United States Patent Application Publication US 2006/0210537 A1 - sequence listing, part 2

SEQ ID NO: 70 - DNA, 1971884 bp, Theileria parva
aaacctaaaccctaaaaccctaaaccctaaaccctaaaaccctaaaaccctaaaaccctaaaccctaaaacctaaaaccctaaaaccctaaaaccctaaaaccctaaaaccctaaaaccctaaaaccctaaaaccctaaaccctaaaccctaaaccctaaaccctaaaaccctaaaaccctaaaaccctaaaaccctaaaaccctaaaccctaaaccctaaaaccctaaaaccctaaaaccctaaaaccctaaaaccctaaaaccctaaaaccctaaaccctaaaccctaaaaccctaaaccctaaaccctaaaaccctaaaccctaaaaccctaaaccctaaaccctaaaacctaatgtcctaaagaatctaaaatacttgtggggataatactaaacccttaacttgatggtcaaaaagactaatctactgtggggtctaaacacttaagtagaaatactctaaaaaccaccgaagtctagggtctaaaacaactgaaaatactgtaaaaacacagaaaacaacttaatctaaaacactcaaatcgaaaaggcaaaatactgatttacaaaaacttactactgaaaaatactccaacctagttaaacaataatctaaaccatcaactctagggtctaaataagcttaaaacattataaaaacactcaaaaactgaaaactaacatctgaaatactaacttattaaatagtaactttctaaaaaacacacttcaaaccctcaactttatgatcaaaaatgtaacaattataacactcaaatttaaaacactcaaacctatgatcaaaatgtaacaataacaaatctaaaacacataaatctactccaaaacaaaagtactaaaaacaacgtaaaacactcaactcaaacaaagtaaaactctaatctataacactctaaaacaatcaaaactaagatctaaaatactaacttattgaatagtaactttctaaaaaacactcaaaatactctaaaactactcaactctagtttccaaaaacaactgaaaagactcaacttactactaaaaactactcaactctagggtctaaaaacaggttaaaacagtcaaacatagtaaaataacaatcaaatctaacatcggaaacagtaactttctaaaacacaaaatcaaatacttaaagtactgtaaaatacttaatctaacttgaaaaccactaaataatgatctaacagaatacttttaaaccctcaaccctggtgttaattctaaaaacatggtaaaatacttatcttaatctaaaacagtaaactcaagactaataactaactgttaatagactcataacaatgttaaacttactaaattctaacattaataacattatctagttaatactcatctataaaactatataaatgactaatctaaaaacttactctagatactgtctaaaaactaaagtctaaaacattatcttgaaacagttaactcaagataattgttaagaacgataaaataatgacagagagaattatgaggtaataaaataaagtacttgaataaaattataataaacccaaatatgagggtcaaaggattaggtattaggacattaggtcttaggacagttagtgggtaggtggttaggaccattaggtaggttaggaccattaggtcaataggttagttaggtccattaggtcagttaggtccattaggtcggttaggactagattaggtcagttaggttaggtggttacgtcttctctagttttctttattcggttgggtttaggtttctgtccttattgtatgtgttctggattagtccttttgggagtctgtcagttaggggtcttaactacttactggaacctctgaatcaacaactgacttatgattggaacttgaaatatcaaattgagttgagttattcttcaatcaaatactcattagtactaatattggatgaagtaactggtggacaaaggaataacattagtcaacatcagtactagacctaagtagtatcctgaaaacatgttaattctgttttatatgattttagaatgttttgatgttttattcatgtgtgtgacgatttgaatgtgttaaattgtgaaatattagtcttaaatttaagtaaaaacattattatatagtttaaagttaatatataaacatattagaaatgtgtgtgaaagaaattaaatgatgtgtgtaacttagttttcaaatggggaatggaatccaaattaatgttaatgtgtctaaaattgaccaaaaatttatatacccaaatggccagtcgaggctcaaaagttagtcggacccggtcgacacagtccctgaaactgatatcccaagtcgcagttactaaatgtgctaaggtttctgatgtataaacaaatccttaaataggcattatgcactggaatgttgttatcactaagtatgttatccataccggctatattatacagagtgtatatacatggtagtatatgtaacatagtagtattggtaactaatccactaggagtgaaactcagatctaaagtgaataactgacaaaagataagttgtaataaagtttaaagagattagaaagtgtaaatgagtggttaaatatgatattgtgttagttgatgaaatgaaagtggaaagtgaacaaaataatatgaaggaaaagaggttcagaaatgctcagaaatactaaaatcatgaataatacatataaagattgaaacaaaaattaaaaattaaagtgaatttgtgtgtgtaatgtgtgtactacatttaaagtggttgtgattgcagtttatttaaagatattttacagttagtaattatcaatgttaaaagagttgtagtcttagaaagcagatttgacgaataaattctgttaattaaattcttgtataaattgaggttgataaccaggatcacatatattatatttacaggatatgttacaggattttcaggtatataatataaaggctcagaagttaagattagtaacaggttcagtctaagttgtagttccaatagcagtgggacttgatccagattttggagtagtagtagttccagtagcagtgggacttgatccagattttggagtagtagtagtttgaccttcagaagcaggagttgtagtagtttgattagttccggttgctggttgtgaacctccagtagtagtttgacctgcaggagtagtagaagctccggttccagttccggttccatcctgaccagttgcgggactagtaccagtttgacctgttccagtagtagtagtttggcctccagaagttgtaggatcaaattttagattcatagtaccagactgaagcgcaatagttaaactgttagaaacaaaatcaagtgagagtgactttatcaagttagactgggtgtgatctttctgtgaccactcatcatcaccaaacataatcttagtacagttgactccactgttaaatgtgaaactaacagaggtattaacgatgtcgatcttgtagtcagatggtcttagttctctgttattgtcaccataaaacctgattgaagtgaaaaaagtaccatgtttggagatgttttcccaggatttaccatctgactgtttaaaaatggagaatgaatcattattcagtaaaattatcaaatatttattggtaccctcagatttaatcgtgaccattgtagagtagacatcgttagagttccaaatagccgtttctccggcagatattttgttgaatccatagccaaactttggggtccatgtgttaactccattctcatccttatagtcagactgttccgtggactctttcttatcaatgtcaaggtcaacaggttttagtttgggcttaatctgcttcagttgatcagacttgttcttcacgaagaagttgttcaagtaaagatccagtgaaaacgccttgatttctttaaaattggaatggtcactatggctccagacaacgttatcacccaggttgacagtgagacatttaactccatcattaaatgtgtaattaaggaatttattgacaatagttatctcgtagtcagatgattttagttcagtgttattgtcaccaaagaacttgagtttacttacgtcatgcctctttgaagtgatgtcttcccagggtttattcttgccagttttatataatagtacaaagttcctagtagttagaagtattacgagatgttttggagttttgccggagcctattagtaccaccttgacggcgtgattattttgagaggtccagatatccttttttttcttcacaatcttactgaacgactttccgggcttaggagtatatgttctatagttatcactcttggagtactcaaaatcattggtactactagttttattgatgtcgagagtaacgacagtggtagaactggtatcggaagttggtttagcttccaggtcattccatttattgaacaatataatataaaacaataattttatggttattatacatcttttcattcatcttacagttgcgttaaaaatcgcatttttgtcaaacagtacctgaatggggaatcatccaaattgaaatatcaataccactgccagtttacttgtactaataataccgataatatccccaacataattaccaataatatccctagcataaatgccattaatactataccaataccaattctaattcagttatgacaaaatacatatactctaaatagctatgctctagaaccaatactccaataacactcagctcaataaactatttaataccattaactaccaggaatatatgggcaaaaattaaaaattaaaatgaattagtgtgtgtcgagtgtattctacagttgaaaagttgactagtttaataaaatgttatttatattcgacagtgttataggtgcatatcagtattgttaaatgtttctagagatccaatgttaaagaaacattctcgtaatgatctaggtcatggtggtaaatgtctatgttgataaaaagagtgacggcaggtccctcacctttaagttccttagtctggtctttaaaatttatgacattgaacttgtttttaagaagatcgaggtatatggcactcggatacccaaagtcaggatcatcagtgtgggtccacagtagcttatctttgttggtgattttggcacacttgacaccttttttaaactcatagccataaaatgtgttatacaaaattatggagttgtgaaggggtctcagttcattataattgttttcatcatccagcgagtacatcttaatatcggagaagtcactctttttgtcagttatatctttccagaacagatccctacgagtcttatgaaggagaacaaaatcaccgctctccaacagaattgacaaatgtttctcatccttgccagaaccaattaacaccaccttaagggcattatcatccggatcagcatcccagatattgatgtttttcttcacaatcttattaatgctgtaaccatatttcgaggtatatgttctacagttatcgttcttggagaattcatattggctggtacaataagtccgatcgatatcaagagtgacgggcgtgatctcgatagatggattggtaagtttcctgtattcaaattgatttttaataaagaaattgttggaaagaagaccaagttggaacattttgatgtcttcatacattttacctttcatgtttctccagacaactttttctttgtacttgatcttgctacacttaactccatcattgaatgagaattcatataaatagtctttcacaaagctaactgaatagtcaacagatgttatctcattatcaccatcgccatagaactttagcttagttacgtcacgcctctctgcagtgatgtcagaccagttgccagataagtgctggaacagtttaaaaagattattactcaggagtattgccaaaaaatcgtcattccaagtcctaatcaaggttccaagtacattatccttagattcccaaataacggtttctccctgggcaaccttgccaaaggagtatccagtcttagtactatatatgcaacagttaccatccttcgaatactcgaactcactggtaccgttagtgttctcaatatcaaccgtgacattgttaaatggcgttatatttagattggggtcagacttgggggttggtgtttgtttggtgataggtatggcgagttcttttattactggtttaaaatctattctcttgagttcaccataggaatttttgacaaagaaacggtttgaaacaagaccaaaataaaacgtagtaatgtttgaaaatttcttagtgtcggtagacttccaaacaacgtcgttatcatacttgatcatagtgcacatggatccagttttgaacttaaaactataaaataattcgaggattgatactgtgtaattgtttgacttgatatcattctcatcctcaccaaggaacttgaatttggtcacatcgtacctgtcaccagtggcatttgtccagggttggttttcatcagactgatgaaacaatgagaacaaactattaataagtattatgagtaaatatttttcattattactaaataacttagttctaacgatggttccagatttaccatctgactcccaaataacattggtaccctgagttaccttgttaaacacatgcccatctttaggggtgaatgtattgatattaccaatctcggcaaagtcaaactcactagtgctctcagtagtatcgatatcaagagttattgatttgggagcaggaattacaggagatgttacaggtagtttggtatcaagagtggtttcgggctgggatgtgagagaagttgtgattgattgtgattccaatgagtcaaatatagatccattttgagattcagatttagaggatttatctgtagggatttgggaactaagaggtgatacactcttacttgacgaagaaggatgagattctacacccttccatagatggaagagtgtaacataaaaaaataactctatgtatattatacattttttcattcatgttactaatgcaaaaaaattcgcatttttcgtttagatatattagtcgaatggggaaccatccaaattcaaacataaataccaacacaaaccaattaaaatagttccacaaacttacttataataatactataatcactaatataaatactattattaataaattaaggtctgtactattaacaacactaataatactaatgcacatatcttctgagaatttcagttcttatattatcttacgtaactatactgatagtatatatggacaatgtatctgatatcttcttatttataacaattttctttgtttatttttgattaccgttacttaatctctgcttaaacaattatttagtcagaatagtatgagattaaccagtggcttagtttggaatttcctacttttgtactatatccagtatttacaggtatcaataggtatgtaagacttatacacacattctgtgtatgtggcatatcgattgtttatttttagtttatctttacctagtcaagattactttaaaattttcactggattttttaaataaaattgtactttttttgcaataaagtatgatattccgatagtaaccgacaccgataatgaaaccttgataattcttccaaatattctgatcatgaagtttaattttggtgcatttaacatttctcaaaaatataaatttgaactaggcattttcgttaatgtcaacaatctaatgctgtttagttagtatcatttcactttgagtcttcagtgaaaattttaaaatataaataaaacatctatataatatttagtgttaatatacactgtgctgtgtgtgaatgtgtgtaatatgttatagaattttatatattaattatttatgtctatgagattttattattgcttttttgtaagattttttgtatcctttcttttttacaaatataatataataatcaccaaaatgaactataatatcttttcttaaagttatgttaattttagatgggcaaggttcattagaatttcttctccaaactagtttatccttaaacataactttactacaatttacatcactcttaaattcatatcttaagaatcctcttggaccaaaactaatataataattgttttcacccagttcaagataacgaccttcagaatcttgtgtgtaaagattaagataacccgaacgactccgtaagtatactttccacttcccttcttcgtggcaaataagcataaatccattttcatgttgaattgtaaacacgttattaattctataataagtcaatgttgacgcgtaaggttttccaagtctatgattaaagataactttataatcacagagtatcatttcgagatttttttgaaatatgtatacttttttatatggatcctcaaatatttgtttatagtctccttcatccatggggacaataataccctcttcattttttttcataaaaatcattttaccaggttttttactatgtttaacagcttcagaagtcttggaaggttcagaagtttctgtaacctcaaagttgtcttcttctccatcactgtcactttcactactaacgggaggttgttcaggtttgtcagcacaataaacacatttgattattattagtattattccgtgtgtgtatattagagatttattcattatataatttatttatacttgatccatgggggatcttataaatattcaaagtatataatacatgatattatattattttatattaaaaatataataaattttaataaattaataaaacattcatttaaatctttaacatatcatgaaaacttaaaaatacttaacatgtttcaataaattaaaaatactttatacaataacatattgtatgtgttagaattaatttagagatatttaggttttacgccactagacttagtgcagaagtgtctatatttacgagctttcctttcaaacagtttgaaatatttttcaaagttaaccataacactcatttttggtgtaatataaaacactagaggaaaaccttcatcctcttcagttttctcccatgccactagaccattaactattattttatggcattttatacctggcaacagttcgtatctaaaagatccaagtgaggtaaaagtaatagtataatgatatttggtcaataaaacttcactgccttcagaatcttgtgtgtatagatatacgtaatctggaatcggagcatcagttcttatccattgccctttaatttttttaattaatataaatccaccgctgttggtcagtatatgaatgttagtttttttactgtgatttaccaatggaaaatatggagttccacttgaatgttcaaaaataatctcaccatcacattctatccgttcaagatttgaaataaataaatatttttttttatctttatcattaaatgtaacattatagtcaccctcattcatttctacaagcattcccaaattatctcttttataaaatttgatatcatatcttttaagtaacgttttttttcgtttaatcggttgttcatcatcttctgacagacttatctcatccgattgatctccacttggaggttgaatttgttttctttttgttggtttctttctttttctttgtttcttttgtggttgtggttgttgtgcatatgcatgttctgtgacataaaaattgtcatcgtcttctattgtttgaggttgtggttgagggggctgagttattggtggttgactgggtgtttgtggttgtggctgagtctgtggttgttgggttacttgaggttgactaggtacgtaatgctgataacttggttgtggttgaggttgaggtggtccgtaatattgttcttgtggttggtatgtttgaggaggttcataaggatcgtaatactgataacttggttgagtggatgtttgagtaagtgtaggtacgtaatgctgataatattgctgttgtggtacttgttgaggttgagactgaataggcgtaggaggcccgtaatactgataactttgttgttgagtgggatgactaggttcataatgctgatactgtggttgactgggttgagtaggtggtggtccgtaatattgttcttgtgtttgagtatcagttattggttgttgaccagtatcataaagagactgtgttccatatggctgttgatatccataaggatcttgggtttcacttccataatagtaatattgagatacttgttgttgagtttgttcctgttcttgagttattgtttgaggatgagttacgggtacatatggttgttgttctaggggatgagtctgaaattgaggtgtctggtacggtccatattgttgaggttgataaacatcataatactggggttgagtttgatatccttgtgtttctccttgatcaagatcatagtactggggttgagcttgtggttggggtggatattgagattcttctaattgttgatattgtggttgatatcgaggatcatcaaatcgactaattctttcctgaatgatttgttctagatctaaaacttcaaaattatcatcttcatcttcttcatcagctggttgatcaggattgttgtcttgtgattcaacatattttattattataaatattaatatacatttgtatgtcacacatctcatgttattagagctttataaaatttaatccatgggggatcttataaatattcaaagtaaataatacatgatattatattattttatattaaaaatataataaattttaataaattaataaaacattcatttaaatgtttaatatatcctgaaaacttaaaaatacttaacatgtttcaataaattaaaaatactttatacaataacatattgtatgtgttagaattaatttagtgatatttagatcttccggcactagacttagtgaacaagcgagtatatttgctacctctcctttcaaacactttgaaataattttcaaagttaaccataacactcatttttggtgtaatataaaaaactagagggaaaccttcatcctcttcagttttctcccatgccactagaccgtcaacaactattttatggcattctacacctgggaggaatgaatatctaaaggatccatttgaggtaaaagtaatagtataatgatatttggtcaataaaacatcattgccttcaagatcctgtttgaatagttttacatagtctggaatcggagcatcagttcttctccattcccctctaatttttttaattaatataaatccttcaccatttgtcagtatatgaatgttagttcttttactgtgagttaatgatgaaaaatacggtgttccgtataaatgttcaaaaataatctcaccatcagattctatctgctcaagatttgaaataaaatcatattttgctttatctcgatcattatgttttacgacataatcttcaccagacattggtacaagcattcccagataatttcttttatagaatttgatatgtttagttattttaatatacctaggcttttttagcttaattggttgttcatcatcatcttcctcatcttcatctccacttggaggttgaatttgttgagttgttattggtttctttctttttgttggtttcttttgtggttgtggttgttgtacttggtcatgttctgtgacataaaaattatcatcatcttccacagtttgtgtttgagtttgaggaggctgagttacttctgtttgtgtttgtggttgtggttgtggctgagtctgtggttgagtagatggtggttcataatactgatatattggttgttgttgagatgtttgtggagccgtggtatgttgataatactgttgtggttggtatgtttgtggaggttcataatattgatgctgaggttgagtagtatgactaggatgactaggttcataatactcatactgtggctgtggtagttgaggctgagtctgagtaggttgactaggttgataatactgttgttgttgagcaggttgagttactggaggttcgtaatgctgatgttgataggatggttgatgtggaggatacccagggtagtaattttgataacttggttgttgagtaggttgagttactggaggtatataatattgacctggttgctgtggtggtacataatatggtattggttcttgagtttgaatctggatttcgtatggttggtattgaccatatggttgaggttgatagtactgatattcaggttgatatccttgtgattcaggttgatatcctgggtaatactgatgttggggttgataatatgataattctgaatgatatccttgtaattcaggttggtaataatcataatgttggggttgagtctctggttgggttggatattgagattcttgtaattgttgatattgtggttggtattgagggtcatcaaaacgactaagtcgttgctgaatgatttgttctagatctaaaacatcaaagttatcttcatcttcttcatcatcagcaggttgatcaggattgttgtcttgagattcaacacattggattattataaatattaatacgaaattataaacaatatgcttgttcattatactattaatatagctttgatccatgggggatcttgaaaatattcaaagtatataatgtaatataatatagattattatagattgatatataagcagattttaaaatacattaaaaagtcaatcatttaaaattttaatatgccctgaattgtttaaaattgttaatagattaaaatataaatcgaaactgctatacataataagattgtatgtgttgaaataatttaggaatgtttagatccttttgaaatttttttagtgtgtgacagtttatatctattaccacgaatttccaacagtttataatatccctcaaagtcaattataacacgcaattttggtgtgacataaatcactaaaggagaaccatcatcatttttattagttttcttccatgccactagaccattaactattattttagtacattttacacctggtctcattgcgtatctaaaagatgcttttgaggtaaaatcaatatcataatcattactagtcaataaaacatcattgcctccatcatcttgtgtgaatagttttacgtaatctggaattttataatcagtcctttcccattccccactacttttcttaattaatataaatccttcactaatggtaatgataataatgtttgttcttttactgtgagttaatgatgaactgtatggatttccacttgaatgttcaaaaataatctcaccatcacattctatccgttcaagatttgaaataaataaatatttttttttatctttatcattaaatgtaacattatagtcaccctcattcatttctaacggattaccttgaatatcaattttataaaattttatgtgtttagttttcttaactattttacattttttccgcttaacaggcctttgttcatcatcttctgacagacttatctcatccgattgatctccacttggaggttgaatttgttttctttttgttggtttctttctttttctttgtttcttttgtggttgtggttgttgtgcatatgcatgttctgtgacataaaaattgtcatcgtcttctattgtttgaggttgtggttgagggggctgagttattggtggttgactgggtgtttgtggttgtggctgagtctgtggttgttgggttacttgaggttgactaggtacgtaatgctgataacttggttgtggttgaggttgaggtggtccgtaatattgttcttgtggttggtatgtttgaggaggttcataaggatcgtaatactgataacttggttgagtggatgtttgagtaagtgtaggtacgtaatgctgataatattgctgttgtggtacttgttgaggttgagactgaataggcgtaggaggcccgtaatactgataactttgttgttgagtgggatgactaggttcataatgctgatactgtggttgactgggttgagtaggtggtggtccgtaatattgttcttgtgtttgagtatcagttattggttgttgaccagtatcataaagagactgtgttccatatggctgttgatatccataaggatcttgggtttcacttccataatagtaatattgagatacttgttgttgagtttgttcctgttcttgagttattgtttgaggatgagttacgggtacatatggttgttgttctaggggatgagtctgaaattgaggtgtctggtacggtccatattgttgaggttgataaacatcataatactggggttgagtttgatatccttgtgtttctccttgatcaagatcatagtactggggttgagcttgtggttggggtggatattgagattcttctaattgttgatattgtggttgatatcgaggatcatcaaatcgactaattctttcctgaatgatttgttctagatctaaaacttcaaaattatcatcttcatcttcttcatcagctggttgatcaggattgttgtcttgtgattcaacatattttattattataaatattaatatacatttgtatgtcacacatctcatgttattagagctttataaaatttaatccatgggggatcttataaatattcaaagtaaataatacatgatattatattattttatattaaaaatataataaattttaataaattaataaaacattcatttaaatgtttaatatatcctgaaaacttaaaaatacttaacatgtttcaataaattaaaaatactttatacaataacatattgtatgtgttagaattaatttagtgatatttagatcttccggcactagacttagtgaacaagcgagtatatttgctacctctcctttcaaacactttgaaatatccttcaaagttaaccataacactcatttttggtgtaacataaaaaactagagggaaaccttcatcctcttcagttttctcccatgccactagaccgtcaacaactattttatggcattctacacctggcaacatttcgtatctaaaggatccatttgaggtaaaagtaatagtataatgatatttggtcaataaaacatcattgccttcaagatcctgtttgaatagttttacatagtctggaatcggagcatcagttcttctccattcccctctaatttttttaattaatataaatccttcaccatttgtcagtatatgaatgttagttcttttactgtgagttaatgatgaaaaatacggtgttccgtataaatgttcaaaaataatctcaccatcagattctatctgctcaagatttgaaataaaatcatattttgctttatctcgatcattatgttttacgacataatcttcaccagacattggtacaagcattcccagataatttcttttatagaatttgatatcaattgtttttttaactggtctaggcttttttagcttaatcggttgttcatcaccttgtttttctggcgttcgaggatcttttctctttgttgctctttttcgcggtttaattggttgttcagtactttcaccaatagtttgttgaggtggaatgggatattgtgttggcggttgacttggtccatatataaactcaggatcacctgtagaaggcacttgatgtacttgatcatgttctgtcacataaaaattttcatcatcatctgtagtttgtggttgagtttgaggtggttgagttggtggtggtaaataatactgatactgtggttgtggtacttgtggctgaggcggtggagccgtagtaggttgataatactgataagttgattgtggttgagtaggatgactaggttcataatgctgataacttggttgctgagtaggttgaggtggttcgtaatattgttgttgaggtacctgaggtgttgattcatattgatcatagtactgatccagttgttgtggtacttgttgagtaggtgctggaggttgataatacccataagtatcagtttgatattgttgaggttcttgctgttcttgctgatatcctggataatattggtgttcgggttgatattgaggttctggttgatattcttgtgattcaggttgatatcctgggaaatgttggggttgagtctgtggttggggtagatattgagattcttgtaattgttgatattgtggttggtattgagggtcatcaaaacgactaagtcgttgctgaatgatttgttctagatctaaaacatcaaagttatcttcatcttcttcatcatcagcaggttgatcaggatcattgtcttgtgattcaacatattttattattataaatattaatataaaattatacacaatatttttgtacattatacaattgatccagctttactgcatggggatcttaaaaatatttaattatataatacaatgtaacataagattattttatattaaaaatataataaattttaaattgaaatatttcatttctagaaaacacacacaatattatataaactaaattgtgtgtgttaatatatctgttatagtatacgtataaaattgaattagttacgtgagttaaggatattttccagcttttttatttcttgtactatacatttgaaagtatattccagcccttcttccgaatacaattttatattccttgaattccaatagaatattccgactttgagttaagtaaattgctctcggataatcatctacattacttttttcccaaaaaaccttatttctaatccgaatcttggaacactccacatcggcgttaattttcaattttaatgacccatttccagttatgcaaacactgtattcgttttttgttaacttaatttcattaccatcagaaccttttttataaagttgtatatgggtcggaccttttactccctttatcacccatctttctttttctcttgtaattaataagaaatcacctttacggttaaaggtaaaactatccctatttttgaaataagttagtgataaagggtaaggagttttagatttatgattccaaacctttttaccgtcacacaatatttgttcaagttttgaattcaattcaaatatcattttgtacatatcatcaaacgtttttttataatcatctgctgtcatttctaccagattaccatcattatttttttttcataaaaattatttctttacatgtttttttggctcagatatgctttcctcatcatcggattttacttcgactgggatatgtttaggttctaattccttatatgtatcacttggttcggatggctgatcagaattttgagatggttgttctacagatagtttatcaatcccttctggtcccttggtagtttgataatattcatcttcactatctgatccgagttcaagtttgacaagttcaggttgcaactctttaaccttatcggttgtttcactttgttctgcaataggaggagttccataattgttaacaggttgtacgatttgataatcatctgattgttgataagaatacacaggaggaccatatctaataggttgataatatggaggtctatatctaggatatcttggtccatgatattcttgtctaaatggccctctaggaccacgatattgaggtctaaattgatgatgagctgtgtgttgataaggtctatgctgtagaggtatttgttgaataggctgaggttgaggagtgatttgagctggtacatatagttgatacggttgtaccaatactggttgttgagtcattggatgaggtgacaattcatagtgttgtactggtacaggtggtattattgtaggtacatagtattgtactggtgctgtctgtggcgtaggttgaaattgagggacatatggttgatttattggttgagggtgatcatagtagttaattggttgtgtttgataagtttgagttggaaattgagggacatatggttgatttattggttgaggaaatgggaaattttgagtagtttcagggtgcccatagtaaactattgtttgtgtttgataagtttgtgtttgttgattatcagatacaggaactaaattcccggattgtggttgaggtattgtttcaggtggttgaggatatttatcactacatctcacatatccaataattattagtataaataaacattcatatgatataaatcgatccattatagaattagatattaacataaactaatgggggatagtagaataagtaaattgttttgcttataatttatttaaaaattaagataaataatcgtaaaatttgtttataaattaacatatatcactaaaataaggtgtaaaatcactattttgaaaaattaaataattcaatgtttaaatgtttttaaaaattgttatgactattctattgattagacattaaaatttatcattaatatatatttaggtatataagtttaaatttagcaatctttattatcttaattattttattaagggatatattttttatactttccactccgttttctataaattttattgtaaccatcgaaacataattgaaaatccaatttcccagtaataatcaaaagcaaaggataaccatcattttcagttttttcccaaactactaaacctttaaattcaactctagtacacctcgcatatgatttaaatctaactctagttgaaggatgatcattaattttagcctcataatactgttttgtcagtagtaagttattacccacagaatctttggtgtaaagtttcagatattttattaccttttctgattttactctccagccataattgccaggatcaactagataatatccttcttctgatataagaacaaatctactaatttttttatgatgtattagtaatctacaatgtttgttttcaggtttattttcaaaaataacctcaccgtcacaaagtaattgttcaagatttgaaaaaaatgtatatctcactttgttttcatcactaattaccttcttgaaatcgtttgtactcatctttattatttccccaacctgatttttcttcataaaagtgatttttttacatgtttgtattggcttaacacgtacacctttatcaggctctccttctttctcaattcctttaccatccccttcaatttcatcctctgatcctacttctatttgaacggtttcaggagctaacgtttcacttggttgtggttcagtagtttgtggctgaaattgcccaggtccatatgggtgtgttataggtataggatgttgtgaaataagaggtggtcgatattgaattcctggatggtattgctgaggtacgtagtactgtacttgttgtattggtaaaaattgtggtattggttgagcttgaaattgaggaacgaatgactgatacgaaccatactgttgggattgaggttgtgacaatacttgtggatatggagaatatccaggatagtactgttgatacggtggtccataatatgtaggttgacttggtggaatatataccggtggtccatgtggttgataaatttgttctaaaggttgtaaaactgtaggataagggtattgaggtgtaggatgttgatatgagtgataaggatattccgtataagtaacaggtggtggataggcttgagggtgaggctgtattggtacgctttgaacatctactggctgtccagtcgtttgtgttacttcaaaattatcaccttcatcttcactatcactttcagtggttccatgcgtgttaccttgattatcagaacaataaacacatttgattattattagtattattccgtgtgtgtatattagagatttattcattatataatttatttatacttgatccatgggggatctttaaatattaattaaaaaatttaaatattattcacctgattaataataaatacttatttattgttaattatatacaaagtgtgtagatttatatatatattatattaattttattttcatcctaatactagttaaatatcttattaaatgattattcaatgaaaactaatttgagtttaacaaaacaataaaattgccatgataaaatttaataaaatacatttaaataaaatgttcacaagaacattaaataaaattaacaaattttagttggatttagggtatttatatttgtgtttatttatcctagtatatattagtctaacacgtccaccccttcttccatatacctcgatatatttttcaaatttaattatataatttgttgatttagtaacagatattgtcgatggaaatttatgtttttgggtgttctcccaaatcaattcatctccattcattattttactacaatttacaccatttttaaatgaaaatttaatagaacaattagcagtaaggtccacataataatcatcatccgttatttcaacatattcattttcataattttgtgcatataatttaacatttccgggaacctttcgtccatatgatgaccatattcctttatcatatttgaccaaaataaaaacaccatccaaactcaaaacaaaattattattatttttgttatacgtcaacgctgaaggatattttttcccaggcttatgcttgaagatagtttcaccatcacaaagtatcacttcaacatttagaaaaaacctgaatctatttatattatgatcaacccatgcaattctgtaatctttttctacaaccatttcaactaacttgccctcattactcattttcataaatgttatttctttacatttttttactggttcggatggtctctcatcttcttcatcttcttcaccaccttccgctcctccaactgctccttcttcaggttcctcatcatcagatccaacttcaactggaatatgttcaggttctaatggttcatttggttgagggttttgatcactaggttgtgaaggttgttcaccagttgcttgagatttagttggtctattatgtttataactatgttttagtttctttgttttagaaggttcacttgaaattttatcttgaatagattcttgagtatgttggggatagttttgtccataactggaatatccaggagaatatccataacctacttgatgtagtcctggataataagtataaacatatctaggttggtctggaccataatgatattgaaaatattcagcaccttgatatccttgattgtaataggccacttcatgttcttgaaccgggatataaacatattgttcatgttgttgatagtgttgatgttcttcgaattgttgatatggataataataaccggggttatagccaacagctccttgttcataactttgcaagtaatcttgttgataatcaggatgatagaaatgatatgtattagattgtacttcttctgagcatggagtatctccactaggttcaacagtttggttatcatcatcttcttcaagtattttttcaattccttttacgattaaattataattatcaacctcatcactatcatcttcatttccagttggttgtccagtaggtttgtcagcagagtatgagtatccaaaaattaagaatattataacatatgtgtaagatacacaccctttcatggtatgattaatatatctttattccatggggaaataaaaattaaaaacgaatattacataaaataaaaaattatcatttaattgtgcgtttatcaattaattctaaatttattatcatttatttccaaattacaaaatattattgttaaatattacatatgatactatttctgtctctatttatgaaaatttattaaatataaaattatattattttaaaagtacttaaaatatataaaaatcattaataaaacaaattaaaacccaatacaataaaactaatatgttttttaaaatttaaactagtgtgtgtaaatgtctatggtacatcaacatcattatatgatgaaacgaaaaaatacctcagttttaatttaaaactcattatcattattttatcctattattattattaaattttaattaaattatttaaaaccttaatatttctctgaacctttcaaacttttaacatctattaatttatatttgcactcagtccttctaaatttaagcttataatctccaaagtcaactataatctttttggtgccaataacagttattgatatgggatgagagtctgcatcacttttctcccaaattggtcttccaaatactttaatttttacacattttaatccttttttaatttgatgtttatatgatttttctggcgttgactctacatcgaaatcatctaaacctagctgaattgaggattcatattctccaaaaaattccaattcaattattggtatatcttgtgtatcttgtatccacttataaccttcaactctattagtagtaaaatacgtatcaaactcaagaatcatttttttattacgaacattatattcataatctatacaaattggataattttcaccttctttcctcttccaaatggtcatttcgttacacttaactttagtacagttagatccttcatagagtttaatcaaatatttattttctgatgaatcaatgattttgtatttttcattctcaattggtttgatagcattcacaccattttcagtgtataatttaagatgcttcacaagattatgcactgttaatttccattcatcatctttgagaatataatttaagtaattatcttcaaagtttatattcacaatgttgtttcttttgtcgtaagttattgaactaggttgtccctgattatcttgtagtttccaaaccgttctctcttccacgttgatcatagtacattttgccctttttttaagtaaaaattgcactttatttggtttgattaattcaacgctacttttattcgcagtcaattcagtataatcaccacaataaccatattcatcatccgtatatagtctaatgtcttctaactcaattccttcggatttccactcaccatctattagtgtggaaacaaacaaacttctttcaaatcttaatgttacttttgatgtttgcttattatatatcataaataaaggaaacggttttcggcgcttatgtacccaaaggggggtttttccaaaagatatttttttacaatctgcaacatggaactcaaattcaaacctgcatccatcaattttagttacactatattctgaagaactcattacatctattataccattttcttcatcagattcagcataaattcggatctcatttttatcacccgcggtacaattttcccaaatctcataatccaatgatttataaaatttgagtgaatttccatcgttcaaatgaattgtaatattttgtttttgtgacgaagttcccttctttataacttctataccataaatctccggatctcgcgttgcccatattacaacatcatcacttttaactatagtaaatttataattttttctggccctgtatttacattttttccgatctccaacaacgtcataatattcactctcttttatattttcgatatctaactcgaaatcattcactatactagttgatatgtctttccaagggataaacataaaaagtttttcgaatattatctttataccagtgtttagacaaattttgattgtcgttttacccaaaccacttccttctactattacttcagttccaaagacattcgggttatgtgttgtccaaattaccttaccagaacatttaacacaaatgaatttgtaatgctctttaactgtgtatttacaaatttgtttctctttaacaacgtcataatcatcattcccttttttattttcaatatctaatatgtattgttcattaccattcgctgttattttttcccaaggatgtaacacttcaactttaaagaactccattttgctaccatcattcataacaattttcatagttttaatatccttattaattatttttatacttactttttcgccatatacctcagggttttcagatttccaaataacactatttccagattttattactagaaattttgaatcttctttagttgtataaatttgttctttttttttgaaaaagttataatattttgacttttttttagtaatgtctaatatatatttttcatcttcgagatttatactaagttcatcagttctttcttgctcaggttcttcactcttgcactctttttctccagttgtttctgttacatcaaagttatcttcttcatctccagtttcgtcacctgttgtgggatctaaaacggaacctgtttgtgcatcacttatatcagcaaaatcttctgaatcacttggtttatctgcacaatttatgcattggattagtataattattaatatggactcaagtttaatgcgtttcattattgtttaacaataaaccaattttatgggtgggggatcttgaaaatattaacaatttaatattcaaaaacaacataattgttagattattaatagagatattgaaattacaagagtatatgcacttttctgattgaaaaataagttttgagcactgatcaaactatttattttttcaattttaacaaatgttatatgaataataaaaaataagtaatctcaaattagtttaaattatcaattttaaaatatgatttttatttaaatcatactattacaagtttactaaacaatggttgattttaatgattttgattatggctgaatatattgcaaattaaattattcctttaacagttgtctttagatcaatttcattataaaaatacccaacttatcaatatttataaatttataacctcatatataatatatactgcattattctatgttattactttatttaatattcttaaatgttaagtattattagtatatgattactggcattatttattattattatcatttttttgctttaaacttatatactggcatttttatgaattaaatatatgtttattatacgttttttatttataaataccacttaattaaaaatactataaaattttgaataaattattccacgtttgaatatcattcaataattttataaatttatattttttactactgtaggttgttttgaaactatactgaaaagaatattgacagataatattacgatttattactattagattttaaaattaatccataatttaacttaattttgagtagaattattaaaaaatttatttataaaataaaaatataaaataaaatcttaaattacattaattggagactttactaattaactaaacatttactatatattattaaaatggcgctgatatactattttcaaagttcctatgattacattagctccctatatgaaggtactatcggcccagttttaacttctggaactatgtgataatctgtaaaccatcttacttctggtgatcttttgtatatataacctcttgttccaaacataatttcgattcgctgtccttgcaaacacctgatttctgtggcataaggtaaaccaggttcctgcctccaaacaagctcattgttatatcttacttctacacattttatgcctgtgctaaatatatattcgatattgttaaatctacataatccaagtctatattgctcatcattgagttgaaaaaggttaccagattcatcttttccaaatagtgttataggaggaatgggatacttgacttgtctataaacaccagattgaactttgaaacattctactaaacaggtttcgtatgttaatatgaagatattagatgcgcttagatatctgaattttcttagtttttcatctccaactttatatttccacgagcttaacccagctatttgtatctcaatacaattaacgtcatcatcaatttcatgtagatattgtccgtatgaatatttcttaactttaactttgctagggtctacttctttggaattggttggatctgaaggatcttcaactaagattttgattttcgatttattatatttttcatcacgtcctacattaataccattttcatcaacaatttcttcattgataaatggaaactcatcttccactgtcaatttaccgaaaacattaagttcaattctttcccatggtttatttttaccagattttttaaatacaaacgcttctctattaaaggtaaatacagtaactacctttttaggggagccaactccatgaactaacactgttgaggcaagttgtgaattaaacgttgtgctccaaatttcaatattgttttgttttactttgttaaatccatatccatcctttgctttgtaaatacccagatttttgttttcaagaaaatagtcaaactgatgttcacccattttagttttaatatttaattccgatggataaattaattttggatcatattccatctttgtagtttgttcgctaggatctgaagatctgactggtttagccatagtatctgaattatcttgttggtctgatctaacggagtaagcgggttcagatccgattatatttttttgagttacctcaaaattatcttcactatcactagaatgctctgtttcattatcaccaagtttattagcagcgtttacaaacgggcaatgctttaaatacccaattagcatcaacgatattttgtaaataatagacatattcattttcataaaaatactttgttaataaagatctataatctccatggggaattattattagatttaagctatttagttgattatattccactattagcatctatttaatgcttttccagatcaacttatttcctgaacatttattactttaatacattttattaagttttaaatcaattaaatatatcaattaaatgttcaatttaccattttatttatcataagttaaggttattttattttttattagccataacagttatcggttgagtattaaaattttataaattcttttcttcgtagcttagtgtctattttaatttatacctcatgtttattaccaaaatcaattacactttattattaattaaaaaagtttattcttttggattaaagcagctaaacccttttagaatttcacctccaccttcatgaacccaaatgtttatatttttgtatttgaccattgtacattttacattattttttaaattgaatttaacatttccatgaccagtcaagccaactgtataatgatttctattgattaaaaaatttccactggcttcattttctgtatagattttcatttttttgttaattaagtaaatgtttttagttcaattttttgaatcatttgttattgtgaatctttttctttaaaagatagtaaaaattttaaaaaatttctcttgtaactaattcttagaggtcattctttttctggttcatgaacccagattgtttgtactttaaattccacattattaagaagtttatccgagcatctcacacataaaactaatatgattattaatatttattaataacacacacatagatttttagtattatccattgaaattaagctaatgggggatctaaaaatatacaactttattacttaaataattattatatagtagactatatttactagattaatcataatctaaatatatttttatcaaaaatataaccattttttgcaacacattcactaaatttggcctagataaactaccaattatacattaaataataaataatacacaaatatacaacactgataaacaactattaattctataacaaatttgtttatgttaattattttcactggtgaataaaatttatataaaattggatactggggaaaccatataagaaaattttattatgtaattagttctttttcaagtgtgtaagtcgtttcatatattttgatgaaatttatactgattaatgttatttatttcttttggaagttttgttcagagaatacaaatggtttggcacggcatggctatttaatattaaaattaaaaaatttacgatatccaaataaaattgattaatatcttactttaactagatgtcaccttttaatttataaaagaagatattcaaagctataccttttagtatttgatatgattagcatgtaagagttatggataataagattatcctatcttttaaaatgaaaaaaattttattattgaaatattaagatttaaattaaaattcagtttatttatgtgaaaaattaaaaccaatcgcgtcattaagaatagtagcaatactggtacaggaaataaaatgtgttttcccaggaaaaatataataccacttgatctttgattttcagggttatctcatctcaacttattcgtttctcctcatctacttcacttttatattgacttttctttttaacactttgcacatctggcttattattctttaacatttgattatcaggttctggtgtaatgtcttaagttaaatggtttaaatttgattttgagattaatttagtctcaaataagttatattaagttgagttagtactagagttagtactataagcatattaccattagttataccatggtacacagtataatgagtcgttttgtatcagattggtattggtgaaacagaaatataaatgttacatcattgtatagtatcacatgataggaataaatcaaaatataaatgatcagtacagagtatgtgtgttggtaaaatgtgtaaatggatagaactgtagataagtcagtttagaacgttagattgaaaatttaaagatcaaatatacaaattgatacatagtcataccagatagattagggaagtattagttaaatcatgcttgagtgataagaatcttaatattgggatgagtattcgacatccacaaaatcttcgttatcttgaagattcttctgatgtgtaactaaaattaattataattgagactctaataaacgtgaatatactataaactaatattttataacaactcatttataatccactacaaggtatgattcaattcaaattattttaaacatttattaatcgaagtcaaaattgttgatattctttgccagtttgaagtacttttttaagtctctactgatttttggatcatcattagtcgaatcatcaattaccgccggttcctttttacgtttccaatcatgataattataaccatcgttatcatgcctatatgcatgaaaaacatataaagcattcgtgtatccgtatatatgagtatgattatctttatgaatatattccacagcaaggaatacgcacctatccttgaaataaaccttgaaaacatcagcataactccatttaatgtgattgattgcatataatggtagtgtgtgtaccttggcttcatcttttccacttcttttcatattcataaatttaagatattctgagattccatgttctgtgtaatcgctatgaaggtaataatgaacatcaaactcttttttaataatttcatcattctttaaaagggccaagtttttctttatggtggtaatattatacctttcgtttaatttggttgttatattaacatttatgttaggaagtagatcaataatgttctcaaatatattaactttgaagtcgagcttattaatttcattcatcttagtaaagtaaggttccagtggttcactaacctttttataaggacacattacaggttgaagtattataaacttccactcattactaggggggttcttttgaaatctaaagacatagagcgtgttggtatataaataaagggtcaattcatcattttctttaatgaactctattaactttataaggtgatacatgctttcatttaaatttaccagtgtttgatcattatatttgactacactatgagaacaagactgtttagcaccagaagagccatcaaatttgtctacattaaattcttcttttgattggttatttttagatttatctttcttgattgttactattgtttcctttaagtaatttcttgtcaatattgttacttcatcatgtttcattaaatttattgcatcaccatttactataatttttttagatttttcagtggctttttttggattgagttttttaacttcctcaaaatatcttttcaaattttcgtctgtttgatctgaatctgctagttttacaggttctttggatactagttcccatctataatcatacttataataattatttctgaaatggtaaacatataaactgttggtatacaggtaaacatccatattatcagttgttttgtgataaaaataaacagctttatgaactaatacatcattcttttcgaattcaataataggtcttccatcataatatatggcaatcaaggcacagttgggccttgtctctacatgtaaaacggtattaagattgccatcacttattgctgctatttgttcgatgggatccatataactatatatatcaaactgaaatctttttaatcttttcgattctaattctctcttgtcatatttaaacgtttgcatttgataggttttattaccttgaacttttatgtttactttatcaggtaacaagttaacaacctcaataaaggttaatttaggctccttcttccattgattattctttagtttctcctcacgaagttcttcatcaggatcaagtctaaataattatgtacacaagataattatggtatatatgacttactcatccaggagtctgtttattttttcattaaatttagtattgatgtctgggagattctcatcagtattaaagtatttccatttgtcaccttcacgtttgtaatacaacaatgaattattgtcaacaatagtaattaaacatggtttattatttcgatatctatacactcttatagaatctatgttttttggcaaattttgtagttgaaaaattgagtctccacaatataaattatctacgaagaattcttcaatgttctcaccagaatgttcgtaacatttgtatttactgttatcgcttctggtttcttgttttaattttacattattcttaactttgtctacaccattgggcccaatgcaataattgtcaatactatataagtcatcttctctatctgaagtcctcataatatcaactatatacttaaatccattcatacaagcataatagttgagtctgtcaagtagcttttctctataatatggttcatttatggttggcataagtactttatgccacttttttccaggagtatgaccataatagtgccttttattataggtataaactaattccataactagtgggaagttattataactatacaggcatactccataaacctgttccttgttaggtatatttaaggggaaattgttttttttatcttcataatttcccgggacagcgtcctctattacatgagttgtaagatttccaaagcctaaacgattttcagttccgtatataagatcatttaatctgtatgaaccaatgtcataatatctgaatacaaatctttcgagaccattccctgataaatgaagttggttaacagaaacattcaatgaattactgacgtagttttgagtttgttgtatgtcaacatcaacaagcttatcagagtcaggatgcgacttatggtttatgttggaaatagtttccctcgagaatattgcctcaaccgttaatatcaaattgttttcatttaatagtataactgatgacttttccagatttaaatatattacagttggattatccaacacccaaagaactgaggcagatatcaaaagttgatcgctagttaacaaagcatcaaaatatattacatcatcatcatagtataattccttcaacaaaaaaggttcataaggtttatgcttgtaaaaattaccagaatcatccctgtaaacattgatctcatttcctcctctgcgatatttgcttatttgaccaatatctaattcaaaacaattagaatacaaactgaataagcaaatcccaaaatataacaaaaatgtgtaagtatttttcatcgaaattagcaaatcacatacacacttataaaactaaccatttgttacggcagtgatatttaaaataccaaactcgcatttttattcatatataaattataatatacatatttacatacataattgattttctttctctatatcatataccaacgacaaggtgaattctgagaccctacaatgaattacattatccagacaaagttagtaaataatgtataaaaatttaagtctattattttttatttcttttataccctctattaacatttagagttaaattatatgttttaaagccaagcttttggttcaagtaatatacatttaaattctgttaaccaaaacaaatttaaccaaattttgttataaaaaatttagtttctattaaccaatcaatgattattatatgaattggatatatattttgtatgaacatttccaatccgatcgagcaatacattaacacaatgattatggtatgatagactaattatcgatgaatatgtaactatattgaggggtttaaggcttaattagtaacaattaagtgttaattgttataaagcaggtaattgtaatttatttatgaagttgttagagttagatgattcatataaactctggatattaatgtagtatcatgccgaacccaaaaaaccattacatattttataccgactttaattgtataacatatggttatagagcatcatttatgattttgattttcataaataatttttatttactttaaatccatgatagaatattttacaattattgggggtctttttaatggtgtcgatttgattctcctgatggattcttttatttaatagttaattattatctctgctgagacaatttgtcttattatatatactaaaaattcgtgttctttataattttgctatgtttactgtcacattattttaatagagatcacactagtactatttattggaccctaaaattttaaactaaaattttgacaaaattcccgattattattttaatacactcaaaataaatgagttttattatatcaggacatcttaaacgttaacaactaattatgggtaatgattgatcttcaacatcgcatttaatcccactttatttgatatgtaaatatctaaattgtgacgcttcacatatccatttgaatgagaaaaactagagatatttcagaattatttaatgaaaagttccaagatgcagttgaaaaacctggttccgaacatcattactgggaaagtaaatcctactccaaatcctatttcaaaaacaagtcccgttttttaaagtttaggtattatgactctgtcactgttttgaaattccttttcttccattgggtcggtaaatgggcttttcttctttctaaacaatatgtagaaccatacaaattacaccccttgcccgttgacgatcaaatcctatattggtacccaattttctcaaagaatgttagtgatggtatacttaaattagagtcatatgaaacaagacaatatggacatccaactgtcaagcctaccagatctgttctattaagagccctattcctaacgttttggaagagaacaacatttggtctcctaggtattatagttactaatgtccttagtatgagcattgcactactggtcaagcatttacttgaaaatttgaacaccaagtcgtttgctcttctgaaaatatttctgttcctatttgctataataggcctacagattgttgatgggcttttaatagagaacttcaccttttatctgaatcgattaagacttgtctgggaacattcagtttctgtatgcgtattccaaaatggcatttcacacagacgtttcttcaataataacgtaaacgggtctaatatgctaaatgtctgtaacactgtcttacacagctgttctcctgattcagaatgttccagaaacccattatattgtcccgccaggcgttttcagaacaaagaaattactcctatcatatttacgtttgaatataatgactgcttttacgtttcaatgtttttggaatccgcagtaccaattatcaactttttgtcaaactttatctatggtgttgtgttgatttccatggagattaagattaacttgtgggtcctatacgtgcttggcgttgtcttctgcttcttaatggtcgttgtcgaaatcataaacacctatttactccactttgtttgccttgtcaaggattataggataggagaatgtgttgaaattatatctgagttaccactcatcaacaaattactctacgatgacattgctattaacatcattactgagactaggaattctgagttattgttgattttggttaggttcttcttgacgctgatcaataagtcgttgtttgttatttgcaacaatgtgacattctttgtcttgatgaattattttgtaaaatcagttagagacgcggaggttattaaggacgttgaggttggaggattcttatcatcattttacgtatttttcaggattatcaactcaatgttcatgcttccttatgcacttggaagactagcaactgcttacatatcatacaacagagttaaaaaatatctgaacgaatgttcacctaacttttacgtaagtgacaaccgatttcctggatcaacacagatgtcatctgacctgcctgatgtaaccaatgagattgcgaaggatgttgtagtattatataaggatgcctcatttgcatgggtccacagtaagaaggattttgttaatgacaacaatgaagtccatttgaaaaatattaacttccaacttaagaggaaagaaattgtcataatgacaggtaatcagggttgtggaaaatctaacttcatcaagtcagctctaggtgagatgactttggttggaggttcaatggcagtagttcctctacacacatcaatgccaatattttattcatctgagaatatatggctacaacagggcactattagatcaaacatcacctttggacacagatttgatgaggacatttatgaatcagttatcaaagcacttgaacttgaaactgatatattatcatgggagaaaggtgactttagagttgtctcagataatgctcactcactaagttgtggtcagagagttagaatggaaatggctcgcgctatctatgcctatctcatatttagtaaagtgaacaaggattacaatagaaaccagtgttcattcctgatgtgtctagattcacagtttcatggattagacccttacgtatcaagaactgtattcttcaacctgttcaatgctaagaatggtctactagttaaggatgatttggctgttatagtttcttcatcactaaccttgctggataaatgtgtcagagcttcagacttggttaagtttcccagaattcccgtatacgagattgataacaaatctgttcatttcaactgttatttgtcagacatttttaaagacaagaagacacaaaatgcctttgagtatatcacacctccttcaggtccatataagttgaatttcttcaccaatgatatgatgaaactatgttattcaagctcaaacaatagtttatccaggaattacctcaccaaatcaaagtacagacgttcattatcatctataatccaggaatgttatcccgatgataaatttaacccatatctactgtatttcaaggcagctggacttgcatttgttctgttcacgatcttttccctagcatcaagtattatggataattccaagttcgtccttgcaaccaacctcacagattatatgttcaaaaaaataggggattatgacgatggcgtcactgttgacatgtccgatgttgtatcacacagcgattctgccctcaacgtaatgctgattattgtgtcagttattatgggctgttccctagtatcgatattatttttcacggtttccactctaatggcctcaaaaagaattcatgaatattgtctcacgtcagtcttcaagaacagctcatcagtgattaagatcaaaaaacagataaaccaaatcataacatatttttcctcagatatgatcttcatcgaccaatatattggtgatatgatctttaccactttcttggcattcattcaaacagccatttccattggaactctattttacacaattcccctttctgttccatttattgccgtatcactggtcattgcctttgaattcgtagtgttgaagattgtcaagtcatttaagaccattcaactgggatcactagaaactatgtcacatgttaacaagacatgcgaagatgccatattaggagcagcaattcacagaagctttaaaaaggaatgggagttggttaatgatcttatcgaaagaacagattataaaatgaggtgttggttcatggcaacttccctgggaagttggacttcagttctcttcaattggttattttcacttacaaccgctctattcctcacaggcctgatcatatttgacaagtttactgactttaagatgaatgttggttattttggattaggtttatcacttggaagcagtgttattaaatctttcaacaattgttcgttttgttttgccaggctgcaggtttttatatgttcacttcgaaggttccagtgctttattcctccaggtaccaagtgtgtttttgacaaattccgcaatgttcatgaagaggatctagttatcagttcatcaaaacctgaggaccaagttaacacagctaacctgcttaggagaagggcaattgaattcaaagacaccaatcccaacttcttaaagaggatgttattcaggcctaagttcaacttcatgtacgtttcgaattatctcccatctgaacacaccggggtagtattgaaggatgtctgtgtttacaccaattcactgatgaataaggaaggcctcatccttaacaacattaacgcaacacccagcaagtctgatatcattggaatcattggcagaacaggtgctggtaagacaactcttctatctgtgctagaaaacaatgttagaaatagaacaggtcaagtcctgcttgatggtagagatttacaagaaatccccaaaagtgtcgtgagacatattgttggcgttcttcctcagttaccatttgtttttaagggttggaccattagaaggttcttggatccaaggagactatttactgatgatgacattaatgaagctcttgaaaattgtggtcttcttgattttgtaaattgccttccaggcggtagaaaacttgatactgtagttgtacccaaaccacttaataccggcaaaaaaattcttgaccaagatccaaaagaatcttttaacaggggtaaggaatcttaccgcgaagacagctcaatgaccatcgatgctcctaaatcaacaggtacaatgttatctgtaagtcagctcagaacactttggtttgccaagttggtattgtgcagacatcagtacagaatgttaatcattgatgaaccaccatctgataacatttctgacgatgagttggaggctcaagatatgggcgtaccaatttacgaactactggacaaatacttcaagcactgtacatgtttcgttaccgcgcattatgcaaaggtgctcaaatcttgtacatccgtatgggtaatgcataacggcagacttataaggacttgcagtgtttcagacgtatccaaaaacgattctatttcgaacatcatcgaagagatggttaccaagtattcaaacaactaattttaatgtagtaatatttaacaatgcaaaattgcattaaaactattaattttcagtctatgcatacatacacatataacttctttaatttttacaacattatcaaatttagaaggcaattgatagttttaaaattgagttatgaatctggagtgatctggatgagttacatgactaaatttagaaatgtgtaatgtttgatcgatggaaagaggttaattattagaatcaaaagtgctggatcacaaatagattactagatatttgaaaattattttcgtatatatgttaaatagtcaaacattaaaaaagtgtttgaatgtatgatgatagatggggaataaactaccatatattatgtttgatcttttttgagttacatttatgtaatttcttttatactattgttagaattagatgattcatataaactctggatattaatgtagtaacatgccgaacccaaaaaaccattacatattttatactgactttaattgtataacatatggttatagagcatcgtttatgattttgattgttaatatatacccccttttattatttttttgatttattcttccactctataattattgggacttcaagagttatcgacttcagtttattttgtatttttaattatttttaaatatttacctgtacaatctaattttcatattaattaacatgctttaatttgtataatacagtagaatacactatctcatgacttcttagcgatataaaacactattttcactctaagaaccttcaggaatagtatacaatttctaacaacatattgaattattatttttaacttcactaaattcaaatgagttttattataccaggacatctcaagccttacaaactaattaccgatttttggttttcaccctcattaatagcgcattcatctcatctctaaacatcgcattaaatctcattttatcctaattccaaaattttaaatcatattttttacttacagatttgaatggttaaacatcgcaatacttccgaatttagtattaaaaaatttaaaacttctgtgagtggtaagtatgattcaacacatcattactgggaaagtcaattatattctcggtcttattttaaaaataaattgtgcgactcaaaattcaaatattatgattccagcagtgtttttaaattcctttttttccactgggctaccaagtgggcatatcttctctccaaagattatgtagaaccatataagttacatccacttcccatttcagaccaaattctatattggtatccagttttatcaaaacatctcagtgacggtttactagcattggaaaaatatgaaacaatagagtatggacacccaaataccagacctactagatccgttttgttaagggctttattcctaacattttggaagcgagtttcatttggtctccttggtattgtggttaccaatgttcttagtataagcattgcattgctggtcaagcatcttttgggatttttgaataataggtcctttgctctagtgaaaatatttctgcttatattttctataatattattacagattattgatggaattttgatcgagaactttagatattatttaaatagaataacaattacatgggaatattcagttgcaatcagtgtgttccaacacggtctgtgttatagacgtaacttcaacaataatataagcggatctaacttgttgaatgtttgtaataatgtgttgcacacctgttatcctgattccgattgttccagaagtccattatattgccctgcaaggagattccaaaacaaagacgtcactccaaacatgttcacattccaatattatgattgcttctacatttcaatgtttttggaatcactatcttacatcgttgattttttgtcgaatttcatctatggaataatattaatttccatgcagataaaggcgaacttgtggatcatattcctttctgttataattttcatatttttaatggttgtttttgaaattataaacacctacttgtttcattttatttctttaattaaggattataggataggagaatgcatagaaattatatcgcagttacctctaatcaacaagttgctttatgacgatattgcaatcaacatcattactcaaaccaggaatactgaattgatgttggttttgcttcgggtatttttaacactattcaataaatcgttatacgtaatgtgtaccaacctatcattttactttttgttaagttactttgtaaaatctgttaaagatgctggagttattactgaaattgatacagcgggatttttatcaacattctacatatttttcaggattattaactcaatgttcatgtttccacatgcacttaaaagacttactacctcatatgtatcatacaacagaattaataaatacgtcaacacttgttctcctaatttctacatcactgataacaaattcactggaaccacagaaatgtactctgacctgccagatgttaccaatgagattgcgaaggatgttatagtactatataaggatgcctcatttgcatgggttaacagcaggaaggattttgttaatgacaacaatgaagtccatttgaaaaatattaacttccaacttaagaggggagaaattgtcataattacaggatcccaaggttgtggaaaatctaacttcatcaagtcagctctaggtgagatgactttggttggaggttcaatggccgttattccccttcacacatcaatgccaatattttattcatctgagaatatatggctacaacagggcactattagatcaaacatcacctttggacacagatttgatgaggacatttatgaatcagttatcaaagcacttgaacttgaaactgatatattatcatgggagaaaggtgactttagagttgtctcagataatgctcactcactaagttgtggtcagagagttagaatggaaatggctcgcgctatctatgcctatctcatatttagtaaagtgaacaaggattacaatagaaaccagtgttcattcctgatgtgtctagattcacagtttcatggattagacccttacgtatcaagaactgtattcttcaacctgttcaatgctaagaatggattacttgtcaaggatgatcttgctgttatcctttcttcatcactaacattgttggataaatgtgtcagatcttcagacttggttaatttccccagaattcccgtatacgagattgataacaaatctgttcatttcaactgttatttatcagatatttttaaagacaaaaagctacaaaatgcctttgagtatatcacacctccttcaggtccatataagttgaatttcttcaccaatgatatgatgaaactatgttattcaggttctactactagggatggcagacgtcttgtaacaaagtcaaaatatagagagtcgtttagtacgattattaaaactgattattctgatgataaatttaatccatacttggtgtatttcaaggcagctggatttacgtttattctgtttataatctttgccgttgcttcaagtgttatggataactccaagtttgttcttgcgactaatctctcagattatatatccaataaaactaacgacttcaatgatggaatctcaattgacttatcagctgtcaaatcacatagcgactctgccctaaataaaatagtaattattattactgttattatcttttgttcagtaatatcatccgtattatttactatatcaagtttcatggcatcaaaaaaaattcatgaatactcattgaattcagtcataaagaacagctcatcagtgattaagatcaagaaacaaatcaaccaaatgattacatatttttcggctgatatcgtttttatagatgaataccttggctatctgttattcactgtattattgttattcatccagactggaatctccattggaacattattctacacaataccactatccgttccatttattgctttatctttggtcactatctttgaatttattgtatcaaaatatgtcaaatcatctatgaatcaacatcttggagatttagagtccattggtcatattaacacaatgtgcaagaatgctatattaggttcaccaattcatagaagctttaaaaaagaatgggagttggttaatgatattatagaaagggtcgactacaagttcaggtgcaggtttttagccataacttttgcttcttggacaaccttattatctacttggatattttcactaaccactgcggtattcctttcagccatgataatacttgataagtttacaaactacgagatggatgttggttattttgggctaggtctttcactcagtatgagtgttattaaatcttttagcaatttctcattctccttcgccaggttgcaagtttttatgtgttcagtacaaagattccaatgcttcatccctccgggaaccaagtgtgcgtttgacaaattccgcaatgttcacgaagaggatgtagttattgattctaccaaacctgagtaccaagtagataaaaaaaacttgcttaggagaagaacaaatgaattcaaagaaacaaaacccaattcatttgaaaagcttgatttcaatccaaagattaatattattgatatttgcaaatatatatcacctgaacacactggcctagtgttgaaggatgtatgcgtctatgcatcatcacttatgaacaaggaaggcctcatccttaacaacattaacgcaacacccggtagatctgatatcattggtatcattggtagaactggtgctggtaaaacaactttactatctgtcctacaaaacactattagaaatagaacaggtcatgtcctgctagatggcagagatttacaagaaattcccaaaagtgtaattagacatattgttggtgttcttcctcaactgccttttgtcttcaagggttggaccattagaaggttcttggatccaaggagactttttagtgatgaacaaattaatgaagccctgaataaatgtggcctcttggattttgtaaataaccttcagggaggaaaaagactcgatacaataattatcccaaaaccacttaacatggccaaaaacttttttgaacaatcaccaaaagagtcgtttagcaaaggtaaggaaccttaccctgaagaagagtcaatgaccatggatgactttaaaacagatggtattatgttatctgtaactcagcttagaactctttggtttgccaagcttgtcttgtccagagatttatacagaatgataataattgacgagccaccttctgaaatattttatgatgaagatggttctgaagttcaggatatgggcatcccaatctacgaactcttagataaatactttaagcactgtacatgttttgtgactgcgcattatgccaacgtcctcaaatcttgtacatcagtatgggtgatgcataatggcagactcataaagacctgcagcgcatctgaagtatccaaaaacgattctatttcgaacatcattgaagagatggttaccaaatactcaaactaattttaatgtagtaatatttaacaatgcaaaattgcattaaaactattaatttttcagtctatacatacatacacatatatacgttatttaatttttataaaattatttaattgaatgtgcagtttatttcaaaggcggacctgaaacacacctgaattatagaatttcaagaatctattatattaactatagatgtatacaatttaaaatatataacacaatttgtaataaaagcctataactttacatattttacatttattcaacactacaataacattcaatagaataattatttattatatattttaattcattctattttcccagtatttattttttaatcttccacagaaaatcagttcatatttttcattaattcaggtatctaatcattttttaacttaattatccattatcatatcatgatttcatcaatgatttttttaatccattatttttatcaacttttaaatattataatatcatttcaatttatttatttttaaagattcaccagccttttctcatttgtaattaaattattatgaatatagtaggatacacataaaatttaaaaaattaaggatatactacatttgaatttcaaatagtcttttccattttttgaacactattccactttaatttatactcaaattactacaaatcatacttgttttaaccctgtcacgtggatcacagacgcggtcttatattaaaaaatttaaattagatttaagttgaaaattaatttgaatcatcctgagaatttataatactttatcaggatcaatgaagaaacatttatcattttttaaaaacaatacaaggtacttggataaaaaataaaccaatagcggatagttattttggtcatgtgaagaatcatatttccatacttctttaccatcaaactttacagaagtacacttagcatcagaattaaatttgtattcataggcaaagtcgtattttttaagttcatacttagccttatcattctctttagttgatgatccatcaccttcaagagtcaaaagcttatgtttggattcaaagttatcttcgagtttacgtaaagtttctaatttcatattattatctttaacagaaaatctatagaaattaaaagaattatttgggaattctataaaaacaatcgttttacctttgtgtaaatatattgttttgggatattcttggcaattattatcaccatgtttccaaatttcatgattttttagtgtaaatttaacacatttcccttcattattgaaagtatatttatgtatgtattgattacttttgtcgagttcatatttattggcatcaagttcgacaaacttattaggatctgatttatcttgagaataaagtttaacatcagagtcataaaatgaagcataaagaaaattttcgcctgattcactctctgtagttatcaaagatgatgcaggaccaacggttacaggtgtggtagtagtagactcaggagccttaggttgtgtggaacttggttgagttgttgttacaggtgttgtagcttgagcctgagtaggagttacagttgcttgagtaacagatggagttgcaggagttgtagatttagtctctggtaccttagcttgttcaggagttgcctcggctggagtaacagctgttgtaggtgttgtagctgcaggagcagcagtagttggaggagtaactgcccctccacttacttcagatgtaggaggtattataggtttagcctcaggagctgcagcagttgttacgggtgttgtagatggttgagtaacaggtgtagtaccagttgtagcagcagtagttgtaggtgttacaggagttggagtaacagctgtagttgtaggtgttgtagttgtaacaggagaagttgtagcagcagtagtcggaggtgttgtagttgctggagttgtaggagtagtagatgctgcagttggtggagttgtcctaggggtagtagtttgtttattagtagattcttgttgggtagtaccctgttcctcccaactgtcattttgacttgattttttgaaatgcataacgcagccatcaagatatataaaaatattcttagtgcttgataaaaaccccagaccatctataacaactttgtaagcatactttttgggatcgcttgattcccaaataactgtcttgcccagtttgatttttttgaacccacaatcagctttagttacgaacgttccttcattattttccttggagtaactgtattcagttgtgttattttttgtttttatgtcaagttctaccaacgttatttgtgttttagtttggtcctctccacaactaggttgaccagtaacagttcgtgtatcttccccagcgcatttaacaccatttaaattccatattaatagatatattaataaaaatattgacatttatatctcatatagttggttaatatacagaatttcttttattatttaagttattttatgaatggggagtgtataaattgaaattttattaattaagaaactgaatatatttaaataattaattgtttttaattaggaattattaaaattggattaattgtgttttaataaattggaccacatacaattattatctctaggggtttttattaaacacttgttttttaattttacacataagtaactgtagattgaactaaagttaattatacctttatagaatcattaaacttcaaaaatttgaagaatattttcgtccattacacgattatatcctaaatactcatgttattcatgttttcttcggtatattaaaaaatagttaacacattttctagtcatttatactaaactatcctataatactctaataacattttcaataaaatttggccttgggtacagcttcgtttaaataagcttcacattctgaatcattaagtataacatctggaattgttttgattgttgagtgggcaaactgaaaaagaaaatccttagaattcagttttgttatcaacttttaataaattaaaaaaagttcaaaccatcaacattagagtgagttggtactataagcatattaccattagtcataccatggtacacagtataatgagtcgttttgtatcagattggtattggtgaaacagaaatataaatgttacatcattgtatagtatcacatgataggaataaatcaaaatataaatgatcagtacagagtatgtgtgttggtaaaatgtgtaaatggatagaactgtagataagtcagtttagaacgttagattgaaaatttaaagatcaaatatacaaattgatacatagtcataccagatagattagggaagtattagttaaatcatgcttgagtgataagaatcttaatattgggatgagtattcgacatccacaaaatcttcgttatcttgaagattcttctgatgtgtaactaaaattaattataattgagactctaataaacgtgaatatactataaactaatatttgataacaactcatttataatccactacaacgtatgatttaattcaaattattttaaacatttattaatcgaagtcaaaattgttgatatcaaaaattggttaatcttcctttatattaaattacgctacgccctttatgtcataatattttttagtttataatactatgtaacctcctggttataaaccgtatttttacctcctggaataacttataactccaatgtattagatcagaaatgtttattattatgattttcaacctgaacagggccttaattattattattcagttattttttacctattcttcttaatcccccatcctgtgtataaatatgcacaaatgagcatcttcttcattacacatcatggcgtaaataatggacttacttacgctcctgtttttgtcgctgggtttatcctgccattgcatcatatactcccgatcctgctcccttttaaactttagcaatatcaataccacagaaatcacagtcagagattccaaccatactaggtaccaagaacatgaatatacaccaaaaagcggcgtacttatttttaaagtaacagatgggtttggtgttgtgtgggaggataagcaaaaactgaccaactgtataggtgcaacgacacttaccaaaaaccacctaattcagttgatacaccttaggataaaaagatcttctaaaatagtcgaggataagttttacaagagattagagtctaaatttgtgaatatatccgataaagagtacggaatcctcaaattggacactgatcagctcactgacaattccatctactttgatattaactctaaggaaatagatgagcatttgtttaaaaatacaatcaggccctttgacggggttccgacactccttttacagcctcttccctcttatagattggtcgcaatttatgatgattttaggacagtgtggtccaaaaaatctactcaagtatttgtagaaaagctaatcgcatactactttttcacaaagtattatttagtcatgttaaatgtaaatgtgaaagaagagagtaaatatctttgttttatgtttaaagatggtaattggttggaagttgagtattatacatttatgaataagttcttgagactaaaatcacacataccaatcacaggccacctttcatttgacattttgaatcttcccgatgaccaggaatactccatagaaaaggacgaaaaatacagcattgaattggctacgtattatcctaggcgcggatttgttctaaacagtgttctaaaaggtgaacacataatttgggaatcagccactgaacgttgtgtttccataagactagttaaaaagaaaggcactgtttacggtataaatttatcgctaaatgatgatcgtgagaaccacacaactttgaattttattttcgatgattatgtattcaaaaacgttacagatgaagagtttaaagagtttggaaagaaactcgtagacccgtcagattaccaaaaatatcgggaagaacatgctaaaaacgagcctccaaaaactcgggaagagtctgaagtcattgttgaagagcctgaaggagatcaagaagaacaaactcaagccgaagctcaagagacccatattcctgaagaaacagaggctttccaaaaaacagaaatgcctgaggaatcctatattcctaaggaaaccacaacgccacaaggatctcctcggagaagagaaccacctgagtctaatgatcgtgaagattctacagagtccaatttacatgaagaagacacaagctttggagattctgagccacagcttttggatataagcagttacaactctagagtattcatgaggaacagctttaatatggacaatgtagacacttttgagttcttacccatgcccaaagtgaaagttagctcaattattgatggttctattgttatttgggagaatttcaaacaaagccattcattcagcaagttgtttgttcatcatagaaatgatctttcacaattgctcaagttggttacttttgtaaagtcgggtgaagtatatacttattttaagagacacaatgcaggttttttaactattccagtttctgattacgagtcattcttcgaaaaaatgggaaactcaatcaatcttcttgacaattcaatacttttaaatctttcaactactcctcaagaaaagtattttgattattacaacgagtatgatgacggagttaatatttcaaaactcataactagatccacgttcaaactttcaaaaataatagacgggcagcatgttctatggcactcagcaaacaatgaatcgtgttctagcgttagtagaaacagattttacaaaaactctgaacttttggtactgaacttctctggattattcaatttctctactaagttttttaaaaaaacagatgagggatattcagagattgaccaaagtacctacaattcagattacaaatcctttaaagatttaattccattcatttcaaacgttagtcttaatatcaactcaactccaggagaggttaattttctttataacgaatctgttgagggtaaatttactcatgggaaatattaccctaaatcgggttatgttttaaataaggttagctcgggatccaatgttctatggacctcgaccaagaaccggtgcaagcaagtttccgttttatccggacctaactctaagaagctggttaggctcttgttttcaaattccactcttcccgaattatactttaaccttgtgaatggcaaatttgtaaaattgagaaattttattgaatttgactttacattgaaggaatataacaagcctgaatctgacgtagatccttgtgcattttgcaaatctcaactggaaagagagtttcttctgactcctgatgttcataaaatttatttaaacacaaatatcgatgctagtaatacctacacttgttttgaatctgatttagtcatgaataaaatatttgttcccaaagacggtaatgttttcaccaatatcactgatgggaatgtcattttatttaattctaaatccgattttaatctttgcgtttacattcaagttttttacggtaatggcagccctagactcgccaaattacgcactctgcccatagaaacttcaacaaaaggttcattatcttatttggaagtttgtgacgtagtaaaaaatataagtcctgatgaatttaaagtgaagcttactgagttaactaacgagctaaacttattaaaccaggctcaaaacaagatcccactaaacatatctttatcaagtacagaatataccgagagggatgataggttcagaggactcaattataaagaattcagggcaaaggagggttattttttcagcaaaattattttttcaaacgatttagtatattctcttgattccgatgaggattgcatttcagttcgtatttacttttttttcgattttccttatttggttgagttagagtttgctctggtggactcaaaaaatactaagctttatttatacagatattccaatgattttaccagtttggatcttgagcattttaacaatttactcagatcgatttctgattttgtttcaaaatgtgtaattttggaattgggtgattttaactctacaagtcgattcgaaatgcctgaccctgaaacaaattctgactgtaaactgaatcacaaattattctcttcttcgtacatatactttactgcgattaattcgagggatttgttagtttggagcgttacttctgatttgttttttgcaaaagacgtaaaggtacactatcttaacaacagtccatatttaattaaaatactacttcaaaacctagacaaggatgagactaaccttttttacgagttccataaaaatgcttggagaaatattaattacactgaatacaccaataaactcaacaaacattcaagatccggagaggatgagtccaaaggagctcctggtgtctttgatctctttgacgttgatataactaagaatatcaacccagatcatgtttcatacgtttcatctaaggctaatggtgtaatttttgttgaagcttctttgaaagacgatgcagacggtattaggtctgtttctaacaatggtaaattaatgtggaaatcatcaactcaggatagtgtttgtaagaactgttttgtttattatttcgatggcataccccaattgttaaaattggtattattatcagaatcagatactgaatgtttcatttataagcatgtatccaatggatactgggttgaaatcgacgatgatattttcacaagaaaactggcttcttttgagtacttatcaaaggttaatgttgatcctgaacccactcaaaaagttgttttcaaattggatacaagtaatattgacaaatctcgtgtgagatttactcaacatcagttgaaaaatttgccttataatcaatacaaacccatcggtaaaggctctttttctgaggttattgatggttcttcaatttggaagtctgaatctgattttgagtgtaatttagtgagaatttacctttctaaaaactcacctgtcctttgtaaattatttttatctaatgatttgggtgttgacaaatatttgtattttagtcacgctggtgggaattggaacaaaatgtcctctagtgattttgaatcagaattagaagatttaactcgggattctgaatttgaaaagacttcagattcagcttccgcttcatcagtggcagaagaattcgatcattcttccgttcaagatgaaaccccagttgaccatattgaaacaattaaacaagaacatgtcggtccagtgggcggttctcctggtcaagctgatgatagtaaaacaattaatgaggaatatatagaccaactagatagagattttagtttatttgaagattctgaaaccattaggcctgaacgtgttgatccagtaggtagagctcctaatttgtttggacaacaatcagagccagagcccgatgaaattctggttgaaaatgttgaaacaattaaacaagaacgtgctgaaaaagttggtaaatctcccattccgtctggagttgatgaaacaattaaacaagaacgtgctgatccagtaggtagggatttcaattcatttgacgatagcgagataatcatggaagaagttattgatcaacttgatagggatttcagttcatttgatcagcaatctgacgaagaatctgatttagaagaaatttttgccgaagattacgaaacaattaaaaaaacaagtgtcgactcagttcgtacagctcccagtccatctgaagatgttgggacatctgaacacgaacctgttggagacgaccaccctattcaacaagaatatatcattcgtacgattgatcttaactcattggattctgatttatgcactttcgtgaatggcactcatttcaacacgccatatactttaataaacgtcaaacccaaagttttaattaaagaaattatggacaatgactccgtcgtctggtctaattctggtgaaaaacattgtattcgtgctaagatttaccgttttaaggagactggagttttgggccagttagttataaaatccaaagcctcgaagttggtttttgttaaaagggttgcagattcttggcaggtagttgatgaggatgattttaacgaaaattatggtgatcttttaaataaatgcagtagttcctaaactttaacgcagtgattataactttttaatgcagttttaatattattaaaccatatattacatattatatattatatttatagtagtatgagtattataatattagttggatatttgattttcatttgtttccagtaccattgaaagaaattcaagtgtatttttgagcctctggccggttgttgacgtattgaaatatgaactcatttctttcaaatcatttaaaatatgttcctcactaactgtagtgactaatattatcagggtttccaaaattccaaccacgatatcttcttccattggaaatctttcagattcttttttcctagaaaatgacgacaatgaactcatcaacagatttgcacattcgttattgaagttttttacaaagttttttgataaggtgaagttggaagggtttatttcagggtaacacccaggaactaaagtgatgttattggtgttaactccagattttccaattaattccttatttacagaagttaactcaaatcgagtagttttatttgatatttgtgaagtgtcgttgaggattttatttgttaatgtatcaatatcaattgctttattaaatgctattgctgtatattgtatgcaaagtaacattgaaattcttatcgacagtgtaaaatcattatcaaacaggtgagaggtaaagaacgctgataaatggagtgggcactgatatgtcatcaatgctaaacttactaatattaatttttctggttcttttgacacaaattccaaattaactcccaactcgttatctttatttgatgattcatctactaattttctctcagttttgttgacaatttcttctattttttctctatataaatccaaatcatctaattttaataataattctgagattggtattgaatatctctccagcattttttcatttttctttataatttgtggcaaatataacaaggcctggctaattcttagtattttattttctacactctcatcttcttgtctatctaacggctgtgtgtttaaacattcgtaatcaatatctcctcttgcagggtttgaaagtaacctttcatagcattgaactatatgttgtggaggcttaaggtacaactccttcacatacccttttactgtttgagcatttattgacggtgtttctttaaatactaatttcaaaaatgcttcgttttccacactatctgtttgtctttctccgttatcactaggtctattatcgtcatcagattgtttatttatgttatctgacaaattggaaacatctgatagattcattttaatatttgaaaagtttgggttaacaatgatactagatttgtaggctgcgagttgatatgtatttggcatgtgctctttatactcctggtcaaacttaagcagtgctgattcgtcttttacaaaagtattattataaaggaattctgagtatgactcagctactataattgtggaaagccttataatcgggtcgagtgtcgatagtccagaggttattccctttgtcaacaacgctgacaatgtattagaaattgatttacccacacatgccttggtacaagacacgaatgtattgtgcaacagtcttgaaatacagccagataactgggtgatttggtttatgtggagagttctcataagctcgtaatctgaatagtaggatgagagttgttccaaaagttcgatctttacaacttcaggtatcaaatctatgattaaatataggatcaagcatggcaagtttgtcctactgagagggtggaagaggtttgacagtgcgttaaaattccaacagtttccataattcaaatatgagccaaacatgagcgagattgttcttctgaccacattataatatacatacgagtcgatgcaaataaaaaattctccttcacactggtctacgtatagaaactttgacaaatacttcaatacggtgcaacataaaaggaggctggagtcacttttaccaaggcagctactgtactcaaattcttctggttcattttctttcaccaaattacagtaaaatttaacaaatgagtctgacaaattagtagagaaacctcttttatacagacgctgtataagatggcttgacggagtttcataattctgcgataaacacgttgacactattaaatatatcaaatctttatatttatgatttaagttctttactgaacgttcttttatttcctctatcaagtgaattaaatcatcaactatttccaaatccttctcctttgacgacagtgaattatgtactgcacaatttgggtcatttataatagaatcaaccaatacatctagatcttcaaccgatttaaagtcaaatgaaacgattttatcaattttctggaatttgtactcaaaatccatatccacagctggaatttgaagaaaaattgtttattcgcattttttaagttaaatatagaaattaattaaattagattaaaatatttttgacgataatatcagtattaaaaagagtagggtgtaaggaatctctatgatgaaacacacatatacaaaaattgataatgggttatgtttattattaaaattaagaagccattaataaaaaatttcgagtgagtttggaattttgataaatttagaaaaattatgtcctttgaaaaatatatcagaaccatgttaaatatacggtttagaacaaatttgtagtctttctttataagaggattgaaagaggtgcctaattttcgaggggaaatttatggtttgtgagagtaagaacggtttgtcctcgtaaagggtcgatgaccctcttttacaaatgaacggaatcctcaagttatgctttctcgaatacctaaataggcgattcgaatacctatatatcatatcctgaagaatcattaaatataggaaatcaattgcttactttttttttgtttataatttcagttttaaaagagtacaaaacgagctggaaatattctctgttaatgcccatatcggccactacgttgttgattagctcatttacttcccaatctgagtttagcatattccagctgattgggcccaagtttagatttttgttggcgtcaatttggacatcaaccgtcacaacaatattaaagcgtgagtgaaaggtatgggatattttatttctttcagcgagcatttccaccaggagagcgaagtcacactctatgattgaagcctcgattatttgcttctcaaactcaatggacaagcctttgtcgtacggaactccatgctctttagaaattattcgggtgaaaatttctacagatttatcactgtcaaacatgttccacatgaatgcgaatgggatcggttgtacattcttagagaaaacagggctaggatacaaaaatagcttaataggggcgagagccgaatttctaggaatcacgtcataaaacttgtccaaatatactgactgcattaaaattgagtggtactggttgtacgttgatactagtctgcgaacctttttctccttatctactaaatacttattactagtgttaactgtgtaaatatatcccttgagagactacagtgataactaatgggcacaaacctgatttattactggtaggttgcggtttggtgatattttggcgaggctggcgtaaatttttgaaataatgaaacaaataataataataatatttacagccgatgttcttcaaaattttcttatcctcatcagttttgtctaaataacaatttgatgttgttttgggtgaaatgaaacctacctttggttgacgcttcggatatgaaatacttcccctgtttcaccaggacttcgtaggcatataacgcctctgaaagggtcatatccattgtaaattacaaattttctacatcaatagttaaacatactactaaactttgtctgagctctcatcacccctaaattccccttccagatggggatctaacatttccacttttttaatattcacttcatttattttaaaatgtaacccatttttatccttaaaatttcaaaattctctagtgtgtacatttttaactatttttcatccattcttcccctcgatctttatagatatgtacggaggactaaatcaagactcatttggagctggctgggcccctaccgaacttgatcatcgtaccattattaccttatttttttatccttactaaattttattaacatttatattttaaaatagttatataacttttaagagagttaacacatgttcctatgatataaaataatttgattaatagttgaacattctgacggcggattctttgaggacgatttatccaatttaataacggaagatgacattaataaacaaaacaccgaagtcaatcttaggaaaactttcatgcctttaaaaatcagtttgttcctctaataactcatttccttcatatattatttaaattattaattatttacctctaaaatgaaaagacacaactaattaatacaatattaattactaaatttagatattgcccttttaatacaaccttgtaactatgtgtagacatgatatattcatcttggaaaacgggtggagtctcaattaacgtatttgggtaccatttggacataatcaagttggttggctatgttaaagatgccaaggagactgagcaggacacttctttcgtgatcgacgatgggactggcactatagagtgcattcacctatcgcctggcgatatcagtgattggaagcgtagctacatcagcgaattgacacgaaccaaatctcctgtcaagatttatggtgggtttaaccctctctacagcagtagcagtccaaccataattatatactcaataaaagaagttacctcacctgaagaaataaaactgcataatttagacgttatatactctgttttattggttagtgtaacaagtgtattaaagtgcgtagattgacggaaaacggaatccaaatctgatggacacaataggcgaaatggatacaatcttgaaagaatttgatatttcaattccgaaagaacaagttgatcaacctctcgataatgttccccctactactgatactgcctctacatctaccaccaaagtaattcttttactcaattatatttagttaactaatttatctatgtttataaattatatgttcagatacctgtgaatgaattggccttgactaaatttatatcatcaatgttagcaaatgaatctagaaataacaattacaatgggctacacatctctgaaatattaagaagatgcaaacaacaacattcatttcaatgtaattttctacttagttatctcttcctggaattatttactcagttatatgacctaataacattgtcgtagccgtacaagagcagaatgttagaaagattctcaaagatttggagcgtgacgctactgtttttcaaactcttgattcaaatacctatgcctctactgattcataactatttttctaatttattttcattttacttcttaaccttttatatgtatcatttagcctgttggaccctcggatgcactataatagaactgctagacaattaataattcgaccccccttttccatttttttcttattttatatttttaaatttatttctgttcatgattttttattttctcgcaaatgtgtaaggtatctttataattatttccagccactcattttatcaattatttcccgtatttctgtgtaaattgtattattttaattttgtttggtaaatttaactttacctttaaatttgtcgctaaattgatcatattttggtcaagtttaatgtgtggaatattcgaatgaatgacgcattccatcataatttttttaacaattgcaattctttgactaataatagtaaaaatgagagtataaacaggaaaatttattgttccagcccttcaaaccaatacagggtaaataactatgcctttcctaattatttggcaccgttttatgaccaaaatattcttaaagacaatccctccaattttggggtttattcctcatcatctttggtctcttcggactcccgccttcaactaccaaacacgggggaatattttacttttcagcaatcagaatcagaagtttatcgggaaattatttcaaattctgtaaccgactttgataacattcgtggtaaaaatatctctcaagttgcttttaaggataattttgaggatgtttctaaggtgttttcggatgaaaaaatgttatttgaatcacttgaaactaagttaaaacctttgaagttgaaagaacacccatgtgaaacttgttctaaaaatggttacagttcgttttacaacaccacttttgatagtgttaaagatgctgaaggcaaggtttttgacccttgtcctcattcttcacttaagaatgtcccaattccataccctatttcttcctttaacaatgattcagttcacactactgctcttaaagtggatgagtttgataaattattgagttacagtaaagaaactgaacttgctgagaacttgcctggtgaaatcgatgacatttcagaatttattgaaaccaaaagaaatttgaacgatttcagcccaatcaatacgaatactcttcgtaacctttcatttaacccccaatcacaaggcgatttacaaagttcacagtgttcgaatggaaaaaactccacactttttaatgaggatttaccggtaatttcattaaaaaatgagacaaccgaggataatttgagcaaattggatgaatggatatatcctaaatgtattttgaagaatgctatttcccctcaattttcgaaaaatttaactagtagaacaccttttaactctttagccactgtgctaaccactaaatcgaccagtaaagatgaaattggatcggctattaatttggaatctaaattattggatggtgagatggacttaaattttatgattgagagatacgttgaactaaggaaattggactatcctgaggacattttaagagcactaaaacacttgatctgtgaaagattaaacagacccaaactttactataaggggtcaaaatcagatcaaattgataaagagactccagagtacatttttaataacattatcaagacagtcaacgtagttgatgtgtttaaaactgagggaaagtgtgttgatgaagaatcaacaatgtatacttactcaagtttgtcgttatcttcgtacgattccgtgtttgaaaatttaaactttgacgtttcttttaacgatttcttttgccaaaaaatcgactcagttcacaagaatactgtagatttgtacggttggcttacagtttctgaggaaaagtcaagaatactttctaacaaagtactgtattgtgagctggtgggaggcagcttatctttattttcaccatctaccagggaaagtaacgactcatttaattcatataaacttcttaaaacggtcaaattggacgagttttcaaccattacaagaaaaaaagattcaaaacagaataaaatatttatacgtctatcaggcactttagaccctatcactgatgcctctaacaagtccaataaaaccaaaactggagataagataatattaaaactagaggctgatacacaaaatgagctacaaaattggtacatattcttattttcaaggtaattctttccctatttacttaaacacccggttatttcgtttattgggacatctctcatacctagccatatactagacactattaaacagttatttagttgacattagtgttaattgttaattagatcgaggataagatcatttttaactatcttggaagaccacaaagttactccactgaacaacactttattctttcttttatatccaaaacggagggttcgtgacatttttactccataattagttttacatatcacactcaaatgaataattctgattcatatcttataggagttgattttgaatagattaaagtatgaaaatgagtgcgaagaggaaatctactccaaattcatcaaaaatcccttctactacgccgatttcaccatgtattatacacattaataccattaactatactatactaataactcatataaacagtattaatagtggtagataggtgaaaatttaatcatatgatagaatataattatatataggcgtaatatgaatgataatgatatgttacatcacatacttaattggaagcaacctgtttacacaattaacttttctctaaacaaactcaatttaaagattgaagcacaaggtgttttagattatctcaacaacaacaacattcgtaaattaattcttgacagaaaccctataaacgaatcattttaccttaacattttacctctgttacctagtcaaactggtttaaagtacttgagtttaaaggggtgttctctatacccctccattacaggcgtgttgaagggtatttgtaggagtaaagggttcgtaaagttttcgttggatttgagagagtgtgaggtagagcctgaagttgaggctttcctctctacttaccccttcaacaatttgaaaattattctccaaaattctttaacttatcctcaggatttcgaaatggacaatttcatagataacaaagacttgtctttaatttccataatgggttctgttatatctggtaaacttatttcgacagaacaggtactggggtgtatgatccaatttcttcaatccttttcggggaaccaagtttacaccgcttatctagtttacagtttattcatctatacttgagtattagttcatctatatttggtctagttaagcgcatatattggtgtagaaagtgaggaagaataactggtcgtgttttggtaccaaagtggacatgagctccgacgtttattttgaataccgcgctccttacttagtttggtacgactggactcctaagaaaaggcttttttcacttaacacacgtaaagactcagaagatcagactagtaagttatctgaggacaaagttatgtttgtgaaaaacgtcaagcttgtggaaaaggccgggactgaatggatgatggttgaaggcaaagtgcctgacaatttcaagtatcaatctaaatatttgaagttttacgttaaaggccataatcaaaatgttactagtcgatggtttgaagttatttctagatggtatcttgcatcacgacattcaattcatgctattcccttgagggcttcttagtttactatttatagtttctttacttatttaccctagttttacagtttttaatatttttattggtttaatctagtataatattgctgtttttacccctgtaattataaggcaaattttgattttagggtgtgtggagtgcaatacattgattacctattacatcattcggacttggtcccttccaaacacattctctcattctgctcaaaaatcgatacaccagtactactctacttattttctagttattggttactacattaacttacttatgagtacctgaactattatgaacctagtaatataatagacttctctataaaaaaatctataggtattggtgatgaatggatttccgttagagcgaaaatttttgatgagatttttatcccagctgtcaactcaatcgactttgaaggggttgaatttttcaaatatgggcatcgactcaaacaagttatcgtttgaatttccggttctgagtgatttagtttttgataagctcgacttttccttcaactccatcaccctggatgaaatgaaccaatggctcctaaacgccttggtacccaaaatcacagtacaacactacgacgttagcagcaacccactgggggacacggtaaatactaccaagttttttctcaaagttttgtcgttaaagccccaatgcatttcgtaattcccttatttatacataattatctctatagaaatcataatatcattttaccagtaccatagttaacagggtattaagaatgtaataggtttaatgattgtaaattatcaaatgtattcttaaccgaattgagttctgaacttattcgaaacaaaatcaagttaaattcattagaaattattgaatttgaggcaaattcgttcaacttggaggtatctactataaactagttaattatagatatatattatagttaacggcttcattcctaattattaattaggacgttaaaaaactgatcgaaatatctcatgagtctttcccaaaactttctgagttaagactggctggttctctggatcctgaaagcgcctctaaattggctcaattgttcccaatttgctcatttgaacgggtttctccttcagaacccgaagttggagccttcacaagagtttctcatgtcaaaaaagaaaaacgtacaacaagaaaattctttcattccatcgcacaataattttctactcttaggaacactttattattattaatttattttttaataacatgatttattttaaataacagaataatttattttaaataatataataatttattttttaaaattaacataaaatgtgtaaaatagtgtaaaataaatgttcgatggtactataaggggaccaagagtaataagtttatctggctcctcgtttcaaacttcttcagggccaaaccgcaaaactcaggcaagatttgatgtttactcctcaattagaaacaaagctgctaaaaaaatcaaagattctcttctatccaaactctactataaacaacaaatcaagctactaaagttcgacctagctgatttgatttcggaagtaaataaatttttcttagattttaatttggttgaaaattggggaattgaccaagttgtatcgtaccatcctattttgagattaatacgcataatcactgcaattcatggtaatttccctgatttaatttcaaattctttaaaaaatgactctgtaaaatttataattaactggtgtaatttaccaatttcacattattccttcgtttttctcctggaaaatgaccagacgagaacacaatttatacttctgataactagatatgttcggttattttataagtttgagcctcatttggaacttaaaaatgctttaaaagttcaaaatttggtcctgaaactcgaacccttgagcctggatgaacaacagttcatcaagtttatgagaataataattagtaagttcccctacagaaatgtcgataatattaatttttattgtaaattagtcacaaattggtacccaaagactctagttagagctcttttaactggagattgtttgcaagaattgtttggtttgagcatatttttaaagcctttgatcaatgacgtcaaggaggcttttgaattgtttgttaaattttggtctgcccctcagctcactgtaccaaaagaacatctgttagaggtgttgaagagtacaattcatgagaatttcctcataggttcatcaacaatcaatgatcaatcccacactacacagaccataaaatctgattcgccacattttagaggcaataaaggcaatgtcagagaatttgaggaactggtggaagaaatgatgaaaaactgttcggaaaaattacctctggaaataaccctaaatagcgttaaaatgaatctcattgaggaaaacctaaaaaccgaactacaatcttacactttcaacaatcatcttcaattattacattacaatcttgtcattagtagtaatagtagctgggaaaataatactaatgccaacggcttaaataatgtgttaccggtgtattatcatgtattttataatctgttgaacttgttgaaggcgattgtggaggaggatttgttaactcagagaactctatctaagcaacttgaatctattttaaacgtactatttgtcactttttgtcatttccccgatccccctaatttgtacgctctacaatccaaatacttcttttggacaaaatttctctgcctgccaaaccttaataggaatttaatactgataataatacagttactgttgccagttcaccagaaaccatatttcctcaacacaagttatgattatatcttgtacaaattggtgaactcattcaccacttctgaagtgaatccgctggaactcgattcttcagttgctaacattttattatcaggatcaaccataaccatactcttggtattgtttaaaactcatttggcgaagtgttgtgataataacattttaatcctcttttcacacctcgatcaggaaaattcaaattattcaaccttttcttctttgtggcacgccttttgtcaacttattaatcattcacttaaggtactgtttcagtccatgcggttcttgcaatcccctctgggctattggctacttatttttatcttatttacttagattcacacagttatatacacccaattatactcactatacaatataacattaactatacactaagtacatagttaataccctatcagatattatataaattataaatatttttagataatgtatgacagtgagataataaagatagaagagggagttcgggctctgatgagcgttgaggacgctatttgggtatcgaacatcttgaatcacatgttctggtacaaacttaaccagaagagggttacagagttctcattcagagttagcgatttttaccctcactcaattatctgcaattgcaacatcgaagttaaggcaccatcccactattcgtacaccaccaccaccgtttctggagcttcagttaattcaataaacattgccaacacaatgaatactatgataagtgatacatgtgtggaaattggtaagttggcccgtaaatttaatgaacgattttatcgtttgagtggatctaattcaccgatgtggattattcctgaagctgaaaaatcgatattacacttcgttggaagtgagaataaatcgaattcatcacagccgagtgttttagtatcgcatattctggactatataccccacaccataagctttaagaacaggttattggtgttttacaactacataaacaaggacaaagcccaatgcagaaacccaatgattgatataataggctcatcagtgtatattataaggcgtcagttcatcgtcgaggacggtatttcaacactgggtaacctgaacaaccaccagctaaagcaagttttcagggttctatttgtagacgagaatggtatagaggagcaaggggttgacggcggaggcctttttaaggagttcttaatcacactttgcaccctgatttttgatcctacatacggaattttcgaagaagtaccagaggagagaagttactacccatgtccaaattctggaattatccacgaaaaccacctcgaactattctgttttatagggaaaatagtcggaaaagcactctatgaacagattctcattgagcctgttctatcccgccttttacttaacttgatacttaagagacgtaacactctggacgacttgaagttatttgacagcgctctttatagaaacattacaatgttgaggggcatgtcagaatctgaaattgaggatttgggtctgacttttacttgcacaacacaatgttttgggagcacaattcaggaagatcttatcccgaatggccacaacaccagggtcacgaagcaaaacctcgagtccttcattcatcaattctccaactttaagtgtaatcgcatgatcgagtctcagtgctctgcttttttgcagggtctttccagtattattccgcttgaatggcttcagatgttctcaccgtctgagctagaactattaatttcaggctcctcagaggctattgacatctcagatttacggaaaaacaccgtctatgcaggtggattcgatgaaaacaatcccaccattcagtggctttgggaaattttggtatctactgcttcagctttgatttgctacctccctttactagttttatcattaactcactctatccttattctagtcattttacgtcttattttacctaaaattaattatgtactatagtaatagtatatattatacgactggtatgataataatgtgtaggatgaatacgataataatgaaaggagttcgtttttatggtttgtaacgtgttgtaagaggtcccctttgatggggtttaagcagttgcaacctccattttgcgtccacaaggagccggatccaaaccgactcccatcagtctccacctgtctgaacctgctaaagttgcccgaatccacctccaaagaagttttaaagtccaaaatcgttgatgcaatgtcactctccaagggattcggcctacactaaattactttttaccacacccattgtgccataaatatactatgtactatatacatttgcatactatatgatatgtaaagttaaaatgttaatatagttgatagagttaaaagataattgagagtttagattgacaaatttgtttgtattcgggttgtagaaccctaacttgataacattaccccttaagggagccatcagtatctgacccagaatctttggggaaaaacttcattttcattaatcattctctacaggttttaaaaactttacgagaattatgttaacttaaattgctagatcgcgataggttgttgaagtagagttagaataatcagttaggatagaagaggtgtaagtgctcctatttgttaatgttcctacatgatcggttcttgtgccaatattatgataattactcaaattcagagtgaaatcgtacgtgtttccatctggttctagttctagataacttgatagagtagaattaacgtaataattcgatgcggatgtaaaatacaaggtcctatttgttaatcttcctacctgatctgttaatgtgtcaatatcaggatgattgcttaagttcgaaatgaaataacgagtatttccatttgaatctacgatttgttctgccaatgattccatattattattacaatttatatcattaactcttaacagagtcattttttagagatttctatttcaaaaaataacaaaatttgataaatactttaagatataaggaatcaacagattaacatgagttcaataggtgatcttagatcatatttaatttctcgttcttccccactggtgagttttataattgaatatctttcatattttgagaactataacatattatttcatctcccatttcttattttaaattaagtttttattttttgaaccaataacgactgatatttttgtatatgtctgatgtgtatgggaatacacgttgtacccatagaagataaaatataccctaaaacatacaatttcttcctaatatttttcacttatagcattaacaatagttttattatatttttgctattataattatactaaattaattatacgataaagtgttcaatacacactgtatggccattgtcgatctaactttacaatataaatattacatatgatagataatatagtacattaaggagtacattgattgatattgttcaatatattatttgagcgattgatcgttgtcaaatctttgcctaaaagctctaaaaataacattaatcagatatatcattacctttatgttcatattttttatatgtttcaatattgtccaatattaagtccaagtgaggaatcttagaggaggggtaattcttcttatagtgagaaattgagtttattaactgggtcaaatctgaattactgcaaaattccgtaattttgccaatttgatttaaagttaatgtacaaatttctcttactatgtcgctctttggcagtcttaccagagctacaagtaactttattgaagagctactattcattttatagtcgtaactaccattttcaaacaactgtttcagaatacaaagacatttcaagtatttagactccttaaatatgtaaatatcccagttattcattaatttcacaacgtttgaaacttcatttaaactcattaaatcgttctgttccaactgtttaagaaatatttgacacatagtcgacgcaattttttcgttatcaagcctcaacgaattgagtgcttttagcattggaaggaacaatttagaacaatcgaaacacaatttaaacacttctgaagactcgataatgctttgggtaagtctggcctttgacgagatgggaagcttatagcagtcaccgaccaccttcaggttaagtaaaatcttgtcaaattttgcaatattggttacattttccctcaaatttaaaaattcatgaactgcgttgttaatagtgattttacaactagaatttataattttccttcttctccggtttaacaatgggttgttatagtatatccacaatactcctactatacctcattatcaacgtatacactacagttaactatgtaacactaagagtaaattcggtatataagatgtcctggagggaccaagtaataaaacggaataatatatatagaacgaatagggtaaaaattgttacattgtagttgtgacgcaatgattgatctttgttcaaatgattttgagagatggtaacagattttgcgatcacaagccttcaaatcgtacaaaagatttgctatgttaatgaggaattggactgaaattccagaatcttgcggtatacaggtagaatccaaacaattaatgagtctcagcttaaactcgcttacacatttggttaaatttggagaatttaaggcagattttagtaaatttgtttttgaaatatattttaaaccagaaaacaacaaatttaaatttacttcatttttcattatacattatataatgtattatatatgatatagggtgttatttatatttttatatcatttttattttatgtagcaggtcagaataatatattttaataaaataagtatctgaagttcaccaaaagttagtatttttactattgttggtatgaatactaagtacgtacaaagagtggataaacaatcgggtccttctctggatgattttatatatgagaaatccataagtttaaacaatggaattaaaaattcttacaacaattacattttctataattcatccctttcgacgtatttcaccttacacatccacatagttatttctttttctacctaatattacgttgttaactatataccacaactattaaatattagttagatgattttaaaatgtttatagaagtgaatttgtcccaaggactgaatttaaatacgatagaaatatagcgtggtatacgcctgagatggctcgaggaatggtaaacattaacaataaaaggaaagcagttgactgtgttctggaggtccgagacgctagagcaccactctcatcagccaatccttcaatattaaaccactatccaaacaacaccaataagctcgttatactgaacaaggctgatttaactcctaaacattcacttcaagtattattacttcaactacactaccacatcttacttatatacttgggttttaactatcacataatggttatatatattagtatatgtatagtagcatgtaaactgtgtttagagatcaagagagttattggaatcagttggtaataaagtaatcttaataaactcattatctcttaagaaaattattaaaataaagcgatttgtgacttctaatgttagtgtcaaatttcctactcttgggttttggcttttagtagttggtcttccaaatgtaggcaaatcttccctcattagagcattaaaacaccattcatttaaggtatgttctgagtatactcaattcctttcataacaatactccttccggggctttttaattacttatacacttatgtacttaactacacattatttctatctcctatttgtaaaatgtattactatgattataggagcaatggtatagtaaaagggaattattggaacacgaaaaaatgagtatgaactaaatttctcatggtgttatagaaagaacaaagcctagggtagaaaatagagcaggaacaacaaagcttttagactttttcaacatctcacttaaccctaaaatcttttgtttcgatactccaggaattatgctacccaagtaacatatcaccattactttatacaagctatacatttgccacgagttaccacattctctactgagttatacagtctattatagttatatacggtcaagatagtggtttgaataaaagatacagaatggatgatgttgagataaatttaaagttggctgcactgggttgtttaaacgattctgtagcaggggaagattatatcgccgactatatcctctataggctaaataaatcaaatctttacacttacgttaaaacccttaatctctcatcaccaactaataacatcaataaggtaaccactattaaataactcctagatttacacttgtttacactttatatgtttttcttgtcaccggttaacgcattttctacttagctgtatagacggtatattatcaactatttagaaatttgtatagatatcgcaacatattggtgaaatgattgaaaagaaatggaattcagttgatccagtaaactgttataagatatttattaaccaatttcgaatgggcttcttcggtaaaatatgcctcgatgatctttctaatgtcattcagcttaaccaactcaatgatttcttactcaggtaaaccttatccttactgttataccagtacataccaccaatataacaaccatcaactccaaaccaacttaatcttattgatttacaacaatccgatcagatgacactatgtccactattacatctgagtagctgtattcattagtgacaaataatcaaaatgctgtagtgaacctccaagtcaatacacgacctcatttgatataattcatgggttataatataaaattttaaaactacacatttgtaaagttactgtgaaaatgtgtaaaattaatgtttttacataaatttgtactatataatttgttgattctatgcgtaaggactgttaaaatcgtgaataaaccaaatttgtacaatagctcaaataagttcacaattcatcgaaataaaattaaaaatgacatttttttcatcaaccattcttgcaaaaatgctgtaaacggattttatgataaaattgataacaatttgatcacacatgaaaatgtgttagaagattccaccgagattccatataataactcaccacttaactttgtattttatagcacaaatgattcaaatggtttaaattacgcggatcagaatatttcggataaaaagtacaatatctccaccggtgtcgctgatattccagtggaatatgagcaatctggttcggttagtaacaatactggcaactcacagttgtataaagcgattggtactaaacagttgaataacacctataataatggtgatactaatttcttacttaaggatgttgagagcaaactatatacgtgtgcttttgatggtcacgagtctttgagtaatgttcttgaaactttatctggtcctttggaaactgtttgtactcatattcacaatgagcataaacagcgctttccctgtaagatcaacgataattttgagttttcagcctttagatcaatcagagcattaatttatttggtaggatcaaggctacttaatatagcaaaaattgctagaaaacactctaatctgcaggtattatcctttctttacagtgttctactcatttatatacaattattacttataccatgaattatatttaatataccagaaagtccattaaatatagttcgttaactctaaaataatcataattaagtattatggtaaacaaagattaatagttaattatatcgagagataaagtttcgtttaacattagttaacaattgttgtatttagtaatattgtttttttatttaattaagggaatgatgattgtaatagtgtgagagtgacgaattggatgcggaaaatgaaaagtgtgaagagactattaggtcctttgttagcactaacgttgagcagtgggagaagttattgactaacactaaggattttggaatggattcgattaaataccctcgattcaccagctctgaagagtcgttggaatacattaaaggcgtttggaagtactttaacattaaaattttcaacaatttattaccaagttgtgacttgaaattttctttttacaaatcacaaaatttgctaaacaacgcaatagttagaacaagagaactattcatcattaatagaacaaacctactggagtttccggagattttataccccaatgaactaaattctttgcccagttctctgggaaattgtgtatttcgatcaatggttaagctgtttttggacatttattcaccattcgacttagttgacactgttaccacagtattaaacggattcagatttgttgaaagtggtaccggtcaaagtgatctcaatttcacagtaattcagtctccattggacaaattagtagagtataatccagatttaatggcccaaattaattcagaccacttcattttagaggaagaatcggatttaaatgatccaaaatcaatttcctcaagcattgatcttagtcctttcctcccaaactccttcttacccataacaaataccaaaattaactatgtagaaaatgataatgtaaatggtgtttctgaggtagtagcaaatgaattttacaaattgtttgaccagtcattcaaaaaaagacaaggaattgataatttctggtttaggggcgatgatgtagttgtgcctgtgcgtgatataaaaagagcattgttaatgggtgggttcgagcaatttacaggacttttcactccagttatgaacaaactaatggaattaaagccagtggaattgaattttatacaaaatcggattattacagtttgtgttgattttctcaactcgctagtttcactgcaaaactattcccttaactactcgttgaccaggaaccccagtgtaaatgacatcattgagagagctaacttggaagttgttcaatgcattctatttgtgatgggattgcaccagaaatgtaccactaatcttaacttatatcccctcgccaatgatttcatacgcacaagtttcctcacacagttattaagcaatgatgaaatcactgtcaataaggataataatgataataccgagtataaaaataatactataaacactatcgataatatagtcggtaatggtagtaatagtggttctgataatttgggactggtgtataaaaagtacttggggcagaatgaggagtttgtgtcttttataaatgagtatttggatgattcagttccttctgacgatcctgatgccctgaaatttcttgtgaactattacaatttcaacctcttctcaggtcgacttcccataaatattggtataaagtttgttagttcggattatttatcatctaatgacgcatgtggaatccttagaacgcccacaatttacataaacgatctcgtaaaaagagataaaataatagtttcgagagtaattctggatgaaatgctgagaatatttttgaaatactgtagcaaactgacctttaatgagggaagtaccggtctcgaggacatgttggagtctaatctggaaaatcgaatgaaacaacactttcttatctcaaccaacgattcatttccattccaactcttagacctttcagaatcagttagcccaatcaatgacaaaaacaactttgtagaaaatgacaatgtaagtggtgtttcgcgcggtgaattaaacagggttggccctgatggactaatgggaaaaggttataagatgtgtaaaaatagattaactgaggtatttaagagcagccttggccctgataactttgtatatcaacttcacaaatcattggtgactgaagatttggataagatttggcttgaaaaaaggctaccaatttctcgttttctatcatcgcttgttaccggcaactttcatttgtcacacagtgtcatatctaatccagcttccataaaggttacctcgaaacttaaattgacccagttaaatctgttggaaaacaagtttaaacaccacatcactgcctatcaccacttgatcagagagttatccaggcacaacaacattacctctttgatttgggaaagtttggtaatagttgacttggcattctctgacctaagagaagaacttatcaaaaacatattaatatacacccaagacttaatagaggcaattaccaacatactaaataccttcaccaacaccactaaaatacacgatcttctagattataatattaaaatacgtaataacattgttactgacaatgctatggataatactgttaataatatcagcaaagttgataataccgatagtaattacagcattaccaatacttcttgtggcacagttgatagtagctccgtagaaaataaaggtaatgttagtatgagaaaggagaccggaaatgatttatttgatcttataaatcaggagagattgaccagagatgaacttcaaggtgttattcaactactttatgacaggtacaataaatatatattcggaggagtgttgccagatgttgaaattcaatttgtccccctgggtgaattatcagaattatctatagattttaccaccttttcagcccctaaaatcctcattaatcatcttcttacggaaattaacctaatcaatagccagttagtgattcaaatgtgtcatttgtcctattactactacagacacaatgtttcggaggaacttggtgaacttggcatccattatacctcagtgtacaacctcatacactcgaataacgagagaattattaagagtaagttaataccttttaccatagagaaaaaactggccaaaacaaaggaaaagaaaacctttaaccaaaactatatagacctcatcaccaatacaattggtaaaaataacaatccgatggataaaaataccaattatttaaactggttggtagaagactttgtggttgaagttattttgagcaggaaagaactgaaacacgatgaaaggtatactaacttttacgaagattatcacacactcaaatcttttgccactcattactttaactcaaaattaggcttagaaataactgacccacttgaacaaactaattcacagagcacacaaaataaacagaatgcacaggataaacaggatatatctgtagaaaatgataatgtaactgttttcccggagggaccaataacagaagactcgtcattagagatcttggatatgatgaaaaataattggttaaagaatatgttggccaagtttgagaaaaagttacatgaaaagggaattaagctctttttaaaccttgaagagtttgactggaactcccttctgaccgatgaacaacaagaacgggtagttaattacattgcaaaacatcccgaacaaagcctattttctatattaaccaaaagcaatgcattaacacaacaacaagttattaatattttcaccagaaatactgattatccccctcaaaactccacacggaactttatagataattctaaagatgattctatacaaaattccgcccaaaactccacacaaaactctaaagatgatcgtcaagaaaattctgtatcattgggagtgaattatgttaacacggtgaatagtgaagaatttaatttggatcctgaggttcaaaaaactagtattgatgtggaggaattgatcagtaatatactgatggatgtagtgtaccaactacctgatcatgaacacgaaacgtttttgaacttttttaacaagttgctagaccaggatttcgtctactgcagaaacattctaaactctcacgaaaccccttctcttctccttaaaagggcatttgaagctctggaatctatacaccatcatcagattgtcgatgaagacgtccgtaacaacatacttaattttttacacatgtaatataaaattatatgtaattaatgttcggctataagagcaaaatattaactgttatcagcaaaaaacttgtggctaaatatactattgttaaggttatgtatgaaaagatcaatcatgttgtataagtttaactttaaggtttgaaatgttgaaagcgataattttagcattcttaaaaacaattatcaactcgtcgtatataaaatctatggctattcggtctataatttcatcgtaataaccatttaaatatagtaaattcagcttgtttatcaaaatttcttcaactttcttcttgggcctaatttcacagaggaagtttctcatccaacagtcataatctttatttgtcagccttttcttatcctcattaattaaatgtatcttcttcaagtctacccttttgtaggttatatcgatccaattctctaggttaccctgacgatagtataacaaatgtttattattgtgcaaaaatatcatcaaatatttatcaattccactataatacgataccttttcaacatattcttttgtatcgcttgctgaccagacagtataattatcaaacgaaatttgcttaaatttattatttcttgtacaaatgtattcgatatattttttattcatattcccattaatatttaagattatcccattatccaatttgttaccgttatcaatttcatcatctgcattaccagtaacaatagagttcttaactgaattatcgacattatcaatgaaattagtgttggtatcagtgttattatgtagtttgattatattgttggtgggatcctgagtaactgagattccacttatatagacaatttcaagagaatcttttatcaaatcatacagaaaataatcaataaattcagggtctcggtctttattccggaatataacacaataattcatttcatataaaaatattttatactttatcttcaagtctccaatagacaaatatttatctccattgtaaaactttaaatttgataaattcatccttgattcagtaatgcttagccattccctagtctcttttatgtattttagtaatgaataattatagttattgtgcaaaattgataggtatttatctccatcgacagaacaaagtgatacttgtttggagtattctgaccatttatcggtcttgaatattagttttttaatccccaaatggcctttatacattagaattttactaaagaagtagttgtttacagtattgaagtattttgttttcaaatttttacacttaatttttgccctcaattcattaaaataactaactgttttggatgatttatgaacttcaaatatcccatcgcaaacatttttatcatttatgttcagtgtaatgccattaagttcatgccaaaatcccgaccttttaacgaacttcctaatctcaccaccaatttgatatattgtcagagtatttaaccttttgtttacaagctcaaattcaactttattggcaagttgactgaaattttctgactcccaaatcaattttttattggacaaactctgacttgagtcaataactgagctaaatccaaagtcttcataacatgaatattccctatcattaaaattttcggtataactatagtaatctcctgggcatttatgacttatgtccaaagttacaggatttaggagaggaacataatctcgtatatctaaattatttaatccatttttcattattttaaacgttattgtatttttaatattaagtgtcggatctattagtataaaaataattttaatacatattaatttatagatccattagttattactatttctgtcaagtattaagtatatttacagatatttctaaatatataatgcgtattaatattatcataagattattttttttatttttgacagatttgtactcaatcaaagtttattttaaaattatttttgttaatatatgataaataaaccgtattggtataggttagagaaggcttaatagaattggttttccatttcttaaaaagatcacatttgtgttatataataaatttattagaattaagtcgattttatcatttgcattctgttttgctgagattgagaagcttgagttttcccaatccacccttacacaatcacctctaacattaattttacactcaaaattttcaaagactacttcacaatttgccaatttaatctcatctccatgatcgttataaagttttagcctacttaatgttattctcgtatgggttacatcttcccagcaggaatactcatctgaatattgatatattaagtaattattatttgccgacaataacatcaaacacttattattattatgtttgtttagaaatactctacaaacatggcaacttcgttctggagatgaccaaatcagtctcgggacctttctgccatttgattccaataccctagttattccatatccagagtaacacataaactctgtaaactttctgctgtctatacaattatattccctcgtcggttcctgtttcttaatatccaacactactaattttacaccattatttgtaaaatctgtagaattattaaacgatcttgtgttattagtgaatgattcaatattatgaatattcaatgaattatcttctgattcaaacgtacttgtaatattgacattactcccactaactttgcttgacgtatttatgggtgcaatagtactatgatatacattagttgtatttgtatatccagaaagttcatttaaaggataaactacatttaatgaaccaattttttcttttttattaaatagtttaatatgtttattattgacgtttagaaattctatccttccgttgataaatttgacatagagttcatctttaaaaatgttataatttaaattcactggcaaatttttaccaaaaatttttttacaatgctttgaaaagtgaaattcaaccgaatatttgaagccctttaagccaattaaataaaggcctataaggtcttctagtctcttgtaattcgaatcatgaatatcataaaatttgtaaatattcaaattctttcttttttgagtattgttttttacaaacaattggcattcagagtattgtagaaatgcatagttattattttcaaacaacaaagccacgtatttttcaccaaaattattaatataatatgatgcatctttaactaattcatctacattttcgctttcccaaactacccaaggtttgccatttaaaacatggcttgaatctattattttaatgattctagtaccaaatctacttttgaagtgaacagaattactattattcttgcattttacataattatttattgttgcttcctcattaaaatctaaaattatctttttgaatattggttcattcattaattttgatgaactgggaaacccatttttcaaatacattatcacaattttatactgattctaacaatatttttaaaataaacttgcattaattggtaaaatcaagatcttttaagcatatttgagatcgttctcagtttttagatctaatatgtgaaatgtactatattagtataatattaatgaaattgaaaaaatgggataaataatcttaattaaatgaaatatttatcaatttctactttcttggtttcgcctgttatgtaattgtatttcacagcgttttccagaacatttacatcaacttggttcattttcccataatcgttctcttgatataatggccctgagtagttaatatttctgtactttacagaacaaaagagtacttttgggtttatttgaaaagtaaaccttcctttatagataaactcaccagttgaggcaatatcaattccaaattcatctaataattttaatttgcgcagagcaattctttggctggtaatatcgttccaactcttattcttgctgtccttatgaaacattttgtactggtaatctttaaatggaatcattaagaatttttcgttcttaacttcaaaaagcgatactttgcttgtatactctttgggattattagttgaccataccacctttgtaagggtacttttcttactgttttcaactattttattaattaagaagccatcgtaacatacataatctttataattatcttccttactacaagcgaattcattttttgggggtttatcatcaatgttcaatactactaatttgtttatatttccatttactttctcaactatttcatctgactcttttttattcccgctcttaggaggatccacattatcacaaagtttagaatcatcataagcatcaggttctgaaataacagtattaattgaattaggattgttgttgtatgaactgctgacctcattcataatagaaccggtgagactatttaaattgttaagtgtggaaatggaatgaaagttgttattgttattactatcatataatttgctgaattttgtggccaaattttctttttccttttcattttcaatggaggttttatcattagaaggaggttcgggttcaactttgggttcatctacaggttcaactacaggttcatcatttttaatcattaggttgattttttcatttttcaggtcttgaacaacagttttattgtttttgtaggtcaatattattgtattttcgagtatgttatattccagttgtttcgctacgctgtattctttttttggctcaaaactctttggaaaatcaatgtacatcatgtaactaaaacgctcaaccttctctttacatgttattttagaatattctacaaatttgagaacgttctctttatcatagccaaatttgaagttgcgaaggttgagctttgacttggttaatctttcccagtttcctgtgtcttctgtccagtaaaaaagttcataacgtccggacctgctttccaatgacatgaatttttcatcggtactacagagggccaatgacacttttactgcgcatactgagcgttctgtcttcttccaaattacgttctggtttaattctggacctaaagtttcaataatcttatcaaatgcgtagtcatcttcacagatgaattcttttatgaggacctttttactttcaatttctttcgtgccttttttatgacattttctcatagttgtagacattttaatcttatatttggagttatataaactttctccttgagtaatgtctagggtaattttgttgttttggatccactttctaccttgtttagacagcttgacaatatctccattggagagattcaatgttacttccttcagtttctttaagttttcatcactttttgctatgatctgtgtagcgtattctctatgtccttttgctttccaaagagttctaaaacccttaactactttcctgaatccgtatcccgagttggagttgaagttgatctctgccaattttagttcggtaatatacttttcagttgttttaattttgtttatattaattctcactggacttagtttgatactattacttcttaagtatgctccgtagatatcacgcagagtcattttgtactatttgctgaactaactttcttgggtttatctactatgttatagttgttattttcgtcagagctattttaacaatattaattaactgaggatctagataattaataaaaaatagtgttttaagtagggaaattaaatcttatttagatctctcgtttctttttagatcttcacttgtaccgtattctgtatccatcattcccttgtatggtatactttacatatcatatttactttatactataatatattttaagccataatctagtccttaattatccttattttagatttaccacatttttattttagttataatttatctaattttagcactattttagtcttattttacctttattttggtactattttagtattaattagtactcaattagaatcaactagggtatttaacggttaattggtttatttaattattggttaatgagtaaatattacgataatatattagaatgccatatgaccgagggagtgggttggtcttttaagtttccactccagaatacaatcataaatgtatttcggagtgactaatgtagagtgtcttgcgccatgtgttattgatatcaaatcttcatcattatttccaaactttctacaatttatattagtactcttaactttattacaactagtatagtgttaaccaccaatattatataactaagtaaaaatgtcctggagaagtagtaaatttaggagtaattggtactgaaacaggtcctttgcttcgttggagtctttatcagtgataatcacatactctgcatctttaggatttgttactatattaccgcatcctaacaatatcagcatcctataaccattatttttaattatacaaatatatgaaaacgtttctaactgttataatctgggctattttattctcagtagaaggtaacgatgtagatatatatcccagagggctaactaagacattagcgtatatttagggacatagtctgaaatcaactaagtacctaacaaaagttgaatcattatttgtgcccgaaatataaaaatcttcattatcaaataaaccggtctgtgctaagctttgcctaccatcaaaatccacacctccccaacatctaggttcacttctaatccaatattaaatcactatcaactaccaatattactatctacacttactatctatatggatatcaatattatcataccatatgttataatattagctatatgaataattaggtctatttaaaggtagttaactagacatatgttgtgctccagtgggagtatgtatgtaggcacatattaataatatggctccatttggtataattgattgaatcatgtggtccaggccaagttttaaaattgtccaaaaggtagtcgattgcagattctttaactataaacacatccccgattaagctcgccattaactataccattcatcttaaacttattcttgagtggatgggctatatatctgagtatctgaattgttaaggtgatttaattccccatcaactaataataatagtataatagtagaaaataggagtgagatacgttatggtcatatttattaattggaatttgtttgttttcttcatttggcacgacgcacatggatacttggttccaggtgtcgagatcagttggtacctggagaaactcaattcctccggtgccagctcctcccatcactatcttcccactagatgatatactactcaaaggaggtgacaccttcctacaaccatacataaactaatatactaactacaactatataaaatattacataaccaactatactgattgaagtggctaggtatctaatatagtatatgtattattcaaggaagttgttcctccttaatcaagtgcttactcaacaactgatttaactttattgataaggcgttgtaagtgatcatcattcccagcaaccgttatcattatcttcgttacaaactcttcgtcttcttcatattccctcctcttcctttttaatataccatttttcctacaataataatattaatctttctacaccccgataaaagttaataaataatatctaatataatatgaaaggtatataatttatagaattaattctaaatttcaaagaaataaaataatgtaaagagttgatagagatagaaattatcgaggaaaataatttacaatcccaatggtggtatacactatgttaactgtgtaatagctactatatattattaactgtatagtatggtattgaactataaatatagtaatcagatactgtttgatgtaatgttgtgttttgttgatgtttggtttactggactgttgtaattgttctttgatggagtagatataaaagccttttaattccataaattggcgttctgaggagttgctttctctaaacgcgggattaactgataataggtctcggatgaggtcagggacactattaaacctccaggagctgagttctttgtcccaaacataattttgaattacactttccttaaaggctgttatcaggcccttgttgtagggtaaaattgaggcagtcaaaggttctttggtaaagtcaaccaccacccggagaaacgaaaaaacaccataatcaaacaaccatttagtaaatatcctcgcgtcaaattcagaaggagtggaaactcccgcaccaaccaaccacttccagaggtcaaacaatactctactctccactttaagacccagaaaaacacagaacttcacggtttcaaacaggaactttgtggaaaccttccaaaccttcaagtccttgtcccattcaatactcttcccgctaatcaaggtcttcaggtaatacagaagcttgttctgtttctcagtccacttaagctttagaatcagcgattcgtcccagtaaaaaagagcatcagctgcactgtcaagtctgtacaaatccttaaggtcattaaacccaacttctttacttaactctaatcctatttcttcattctcagctaataacatcactgtttgaatattcttatcactgtccatagtattatttgtgttagagtcattagtactagacgtagaggagtcagtttgcttatgtttgttaccagtattattattagacttaactggatgaattttaaacaacaaacgctcagcaattatatcgtcaacattctttacataccattctatttctaaacacattttacataccatcatccatatactactgtatataactactatgtgatagtatatatctaagtgtatagctaagatgtagttttacggtaggaaaataccggaattaggaaagcaagaatcaaaattgtcgtttagtttgattgaattaggcgagacagtataagatccaggtttggccttaatttgtattaaaatttgtaactttacgtccaattcctcaaaagttagtatgctagatatttcctgctttgtggcatacatacatgacggtgttaccatcaatccttcacctatggtgttagagatatttgggtcaggatgagaggggtctgattgttttgtcacggatgattgcggatccgaggccccgtttatatgattacgaagttgtgaaaaatcatcatcggaaaggcgagggctccgaataatcttaactagaaaatgtttaattgagaaattatcagaaaaatgattcaaattaatcggaatataagccgtgtaccagtcgtcaatatcaatgtttttaagaggataaagaccgagtccaatgtaattaattgagtaataagttctaagtggagggtatcccatgagggcaaacgacttcaactggttaacgtcggagccctgacagcccggaacaaaacatttgttcctgtcgttatcaaccacgtcaaagtggctcagctttagcagttcgtttatgatcttcgattttatgtacgaaacatgtttacaattatcaggcaattttatcactggatatactccgtccgacatcatacacaccaattcataaaccttccactaaattcctactttccaattaattcacagttacttaacataatattttacaatttaactcaattttaataattcagaacaattagagcactttataggaactggaaggattttgtcacaattaaaaaaaattattggtgaggaggcaattcaggatgtgtaaatggtgaataaaagattaaaaaatattactctaaatataattaatttagtttataggaatctaatttttaaaaagttttttattttttagattccaccactaccacattcttcattattttttaattttttcactattttttacctttaattagtattaattttaaaaattttatttgttttcttattttaattgttacttattaaataaaattagttttaatgatatatcccatcaaatgagttgtaaatgtgatgaaaaaggaatccatttatgactgttggcttttgtcaaattctatcagaaactcgacttcttcggatgagctttatactttgttgaagaagcacttgatgaagcacaacacaattcatgacattggcatgttcaacgtaccatttgatcttcgtttcaagtcttttgacactctgttgacatgtgctgacgagttggagaaggaagaccagacggttgaatcttctctcaaaagagccaggcagttggccgtagatattaatccatccgtcgagttaaaggtacattacgacggtagacagtattcgctttctagttatgtaagcaaatttgtttgggatgaccgcaagtttcctaagtacttaccaattagtgaaaacctaaaaaatctatcgcagttggttcacaagttgatggacgacttgattctcaagtctgttgcctacaacgagttaaagtacaaacgcaacagtatcaacagtaacagtgacggtaatattcagttcagggaccttgtgtatgtaattactcccgatgtagttgagagtaacgatgatttcatggagaccaatcacttgacaacagtcgtagtatacgtcccaattagctcacaggatgacttcctcaacacttacatgaccttcagtgataacatcgtaccaaattccgcaaaacacatcaacttacccaaatccactaagttagatgctatctatctatatatcctcaattacagattatactattatcatatcataaataagttaattttctcttctataatgattaaattactctttaaatacttttacacttaaaatatactgaataattgcaaaatgagtataaattgttaagctgaaaatgtttagaactggagggataatgctgtggcgtgtcgtgctatttaaatcgagtgttgagaagtttattgagtcatgtaaatcgaacgggtacaacgcgaataagtttgtgtattctgaggatcgttacaggcaactgctggaggagcagtcacgactggagactgacgcacagcgtcaacaagctttcctctcccgaatctatgatgtagctcattctgacattttcatttattgggtacacctcaaggccatgagggtattctgcgaaagtgttttgaagttcggactacccgtccagtttgcgtctctatttatatttcctgtcagttcaaaacaggaacaattgcataagattttgtatgaaatgattccaaaatactcaaattcggaacagaatacaggtaatgtgtcagttcctggggaacatcttgtttcagtcttctcatactacttcttaactttattcattttttaattctccagtcagttatatactacaaacactaatttacacattttttgtaatttgtattacagagacaaaggagaaggaatacgaaaaatgtactgatacttcatttttaccatatgttttcttatcatttaaaatttcttaatttcttcacaacatcttccatttatcccttctacccttattattattggtattattatatcgtatattttatcactatagtacaatattaatattattgtgtaaggttgtgtaaatttatatgggattccagtagtatacagtataaatcaaattagtatatataataatgataaaaaatatatgtaatataggattagctaaagaatcttacaatttatttcaaaaacgttacttggttcgtattgtagagtcggccgacgactacaaggctacaatacttcaggataaattagtactggctaagtttagtgcgagttggtgtaaaccttgtcagaaggccaagccggtggttgaagagctcagcaacgagcttcctcacctcaactttatcgacgtcgatgttgacaaccttccacagattgctgatgaagaaggagtaaaaaccatcccatttttcaagttatttaaaaatgggaagctattagatgaaattacaggtaatgtcgtatccttccttacttttaacatcaattacttatcaagatattattttacatttttaaaataattatttatactccctacacttgtaaaaggccaatttacaactaatatttctggatattggataaaataggcttaattgcctgaaacttaggaaagcacacaatttgccaaattattggcaattggtgtaatttctttccacaacaaccctcaaaactatatatgttatttttatatagtgtataataatatgtgtaataatatatgtattgttgtaggttgcgataaagctcagttgaaagatttaatattgaaacataataattcttaatattacatctctttttgttctcactatttttattattaccattgttattattattagtagttttagtatagttttactataatattgtctatcaatacgtcggtgcctgacatgagataatttagtgttaatttatttttgattttactagacaatttatcaatgaattaaataaataaagttatgggaattttacataaatattaccttgaaggggatgatatttacgagtattttttgtctattacattacattatttttttacctctataatttcaattaccttgatttttcttagatgtattgattgcggaagtcatttaacaacctccaaagaattagtttctaccagttttagaggcagaacgggtgtagcatggctctttaccaggtattccgctctgttcaggcaatttttgttgctatttcattacttccttcatactactcctacatttccactttttttacttatttatattattagaatagaacatactacactaatactatggacaattagttctcccaaacctaatatagaatatatattccagcctgagattaatattttgtttagagtggttaatgtttctgaagggccttttgaggagcgtatgatgacaacaggccaacataccattgttgacatttattgcaatgactgtggagctaatttgggtactattcacctttattgagcaactcctttcacttagtttatatactttcctagttatttttaactccatgaactcctccctttctattatttacacttacttattgataagtcacctaatttatctatacacacccatactaataatacatttatgtaccagtggtaatatttactaggttggaagtatgaagaggctactgaggaatcccaaaagtacaagaagggcaaatttattttagaaaaggttccctttacgctattcatatttcaagacatctaatgaatttttaggcactgttgaaaaacaataatccgaattattccagtagtgttgaagacgataatgatgttactgatgattaacctaaaactaccccaattctagccattaaccattactatttggttcaacacacttaacggatttcacacatttgaattatcatgaaatattatgactatttacacaactgcttatcttaaatctatgtaataggtagtaaaaacattcaatgtaacacattaggggcgagtgttttaacacccgtttagactacttgtacatacaaagtatagatatattaggttccatggtaaagtataaagtatagatagattattaagttatggttaaagactttcaaacttagaagcatcagcttttttgaaattgaagaacgaataaatttcactgagattgcggtttagaagattatcaaactcatcaacattaaagtcagtaaaatgtgtttccgatctcttagctaaatcccttcgaaaatttctgagaatatttctcataagcaatcggtctattcgtatctcagcctgcgaatttattttgtcacttattaagctaactgcatgttcgtatggattacaagagccagaatcggtattaatgtccgtcaaaaatgccagcaaggtatctgaagaaaacatagaaatttcacgacgaatatggtccataacaatgcctaataattcagcaagttcagattcgtcaatagtattaataataaattttattaataaatccttctccttctcataaaataaatgatcaggagccctttcaacttgttctatcaatctggccctatcctcatcagtaatacaatctttgactatatcatcaaggatacccttggctctatctttagtactaccacaaagataaaatataatgtttgaaattggagcgtttttaatgctacttattgattcatcaatatgacttgaatgacttgaaagactcgaaaatcttattacatcaggatcgttataacgcttcttaagcaataaacgataaacagagttaagttgtgtttttaattcttgctcatcctcgggagtgtagttaatacgaatagaattggcaaaatcttcatagtcagattcaacggattgatcatcaatttctaatttgtcattaggtgaatgttttgactcaatatcactggagataggatgagcttcagagtctaagggttttgaaactaagtcaggagattcaacgttcttggtatcagtttgttgttcgaagttgaatgaataaatttcacttattttctggtttagataatcttcaaaatgttgataataacaattatagaagtaatcttttaacctaaaccaagtatcgtcgtccaaattaccttcaatgtttctcataacaaattgatatattagtctctctgcatccagattgaaaaaatcgccaatcaactcaaagtcataatcgtataaattacgagactcaagatctgatttaacgtgtctaaaaaatggtagcacaatatctgaaaaatggataaaaatggcatcttcaacatgacttttaaaacggtctaccaattgctcaaattcagattcgtcaatagtacgatcaataaattttattaacaaatccttttcattgtcacaaattagatggtcgggagtccttttaacttgttgtattaatctagtcttatcctcttcagcggaacaatctttgactatgtcatcaaaaacacgtttggcttttccccaaaaaccaccgcaacgatgataaagattatgtgctactgaaccgttctgattgggaggtttaaattggttaattgatagtaaacgagaagagaaagacaagatgtcagaattactaaaacgcttcttgagcaataaacgataaacagagttaaggtgtgtttttagttcttgctcatcatcaggagtgtagttaatcgaaataactttaggagtattagttactttctgatcatgagtttgtggcttttcagaaactgaaagttttgactcaatatcactggaaatagaagataattcttcagagtctaaggtttttgaataaaaacctcccatggttatttaagaaacgaaatttgagttaaagggagatcaggaatattaaatactgttaaatatattaaaaattttataattaacacaaatactcatatctaaataaactggatcatcaggagtttcaagatctaaagttggaaataggataaatagatcaaggcagagagttataagttactattgcaataccttggaataatttaaaataggaataaaggattaatatatgatagaatatggaatctgtgtggacattgacaaatttccaattattagttttgttagttatttctattataaaattatattaattattttattcattaaacaacagtgaagtatgctgacagaaaaactacgaaccaatgattaatattatgaaattgagtcaccacatgtgtgaaaccattatacaacactacacgaatactaaaatgattgtaccgctaagtatatcattaactatacaaattcaaatttaaagtcaataaacaaatatgatgtattgaataaattgatagataaattaatgttaataaaaagtgtgatgtggagtattacattccgcagcctgagaacaaaaccaccataacagtacaactgttttgatgagacttttaaatttcagaaaactcctcaacagaaccttaggagcactatgttacagggtgtgtttaattgggataatgtgaaacattttgatcagtttataaagcgggttgatacagagctgtaattaattctcgtttcttcatttcaagcttcttgtatttgagttatcgggggttagttatgcgagtttcagaccttagattaaagactttggtttccaatttggctttatttgtcgttacatcgtatactaaccacactgagatgtgttttccacaatgctcaaaattatgagagaaattcttgtaactaacgcgaacagggtcacctaggggaatgatacaaagtgggccgaaaaaattaaacttcaaatccattggtgatagttcttgtctgttccttttaatcaccttcaaatctttagtattgaacatttctgatgatttatcaacccatacatcagaatctgacgctctgtaaaggaatttaaatgtgttgttctccaagacaactattacccacttgtcatcgtcaatatagtaatggacttgtttagctaaaagaccatttttcttgactttccaaatgtttttatttccttcaactattctgtgaaaaagttcatccggaggacacttgtaagacctaaaatttttatttttcgcttctatataacgtggtaataaaagatcaaaatccagcgaaacataatttgttattaattcttcggtcgtattctgttccttttgagaactacaatttacttcattttcataactaatcaaatttctgaaataagattgttgatcagaaacaaatttaggatcatctatcgatttatgttgaactttatgaaaatcaatggaaaaggatcctagaaaagttacaggggcttctccttctttctgttcctgagttaggtcatatccaaaaccagattcaagtggaatagatattgatgtatgttgaaataaatgagtttgtatgttgcctgttaaaaggtcatttcccaaagaaaacaacattacaccgttgtcactttcttcatacacagtatttccttggtacccaactttctttggaaaaaatgaatagcaagcattaagaaaatgctcataaagctctgtctcacattcgaacgaactaaatgttctccatttatcgtcgaccacatctaaatatttgaagttaaacctctctggtatacatttccatccccaataccaatttctttccagaaatttcaacgacttttcattcaacatcaatacgagtaaaccaatcgtaccattagaatataacagaatctgagttgaatacgttgatcgattcccaatccatagtgtttttttcaaatctcttaaagtaacaataccgaaatccttgtttgcttctaaatatttgtaatcaaatccaaatacaacctcaacgccctcagacgatactttctgatgaatatctactggtattagtctaagtttttcctcttttttactaacactagtgtttccactgggtcccatatgagtaattggtgctggacgatcgggaacattatcaattattccatcacttctaacggggattttcttagacattttcatcgattcaatcttcgcggttttaatatgcctttcaataacaacgttgatatcggtgtcattttcattcatggattgatacaacggggattgctctattagagtttttaaattccgaatgtaattttcaaaaaattttccccgaccagctacatttagactactctcagacccttgagtcactacatttagaggtccagcttccattttgaattaatctgaatttattaaaatgagtacattttttgttgattgtttacagtcattatctataattttgtttaaacaaaattttttatattaaaaaatataacaaaattttaaatatatcaaaattataaaaagaagtattattttagatcttaatgtttcactccctacatcttattgtattattgtgtggcttgtaattgatcaacagtttaattattcatggttattgagtattttactctcaatttcctttaattttactcctcagatacttattttacaattggttgcatcctatttgatctggaagcaccaattttcttggaccaatgatcttgcgattccattaatattaactaatccacacattttcattatttatagttatttatacttatttatagttatcttattatattctactgttatcatatagtttagtcataaattatcagaatccacactgtcactaattaccttaaacactaatttaccattatcacatgttaaccagtattgttctacacaacaatgtaattctgataaattataaaattctaaattatagaaattgtacgacatagtgaatatttagtagaagattgattggcggtatcagttgaaaaatgatttatattggaatctggtcatccctgtctggtaagtcgtacaattcgcccttataatcccttcttctaagtttatgacttgaagtgattaacgatatgcgtttccttgttgacaaactggttctccctccaccctcatcaaacacctgtttctgtaaatcgtcatcgacgtcgtcgtccctagttaggaagtctggtggtacgtgtgcgaattgaacacctggagacttctccacataccttaaattatccagaatctttaccttaatcttatccaggtgctccttggtattataattggtcatctgagagggagtgagatggagttggaagtcaggcgcataataatcatagtaatcgttcagtgaaatttgatttgacatatctgtgtgtttgttgagtataactccggtttcgtatgcccagcatcgagcaacatttcgaattgtatatccaccacctcctaacactaaaaggggaatattgagagatctaacatattgtacacaggctgcatggccctttatggttaggttaaaccgacccaaacggtcaccagtgagcgagtctgctccacactgtaatactatagcacctggacagtatacctccacgcacttcccaaccacaactttgaaaaggtccacgaaagattcgtcatctattccgtcatttagcggcacgtttacagagtagtatttaccggaggatacaccaacatcagtgacatcgccggtaccaggaaagaagttcccgaacttgtgaaaacttattgtcatcacacggtgagtaacataaaaagcctcctcaactccatccccgtgatgaacgtctatatcaatgtacattaccctggcgtggtatttcaggagttccaggatccccaaaacgatatcgttaaggtagcagaaaccagaggcctcagaacgcttagcgtgatggagtccgccggaccaattaacgcaaatatctgcttgctggttgttcagcctatgggctgcatcaatcgacgctccagaacacgactgctggaatacgtatagcccgtcgaaaacagggcagtctgtagcctcacccacattgaacctcttaagttggtaggtgaagtcgcggtaattctcggggctcacgccagatagaaagtgaacgtattccgagtcatggaaggacagaagctcgggctctactgccttgtgcggtctgaaaatctccatatgcctgtatagatcataactcagcaccaacgcgtgggccatcctaattcgctgaggtttcatagggtggccagggccgtaataaaaactgcccacatcagggtcataaaaatatgatacacgcttgtccattactgacccaggggctcttctccaaactttaatgtaacgactttatgcttttcactcaaaataatcttttatttagaatattcctttggggtttgatatcagtttttaccaaaaataagtacttaaaatctccacaattagataaaacaatccttaaaatagaaaatctatccctaaaacaattattttgttctctgaagaaatattctatggattgaatgaaataataataataataaagatgagaaccccggaccgctatgagtaactataattaaagttaaatgaataaaatatgaataaattactactattagtactatatatgctataccttggtatacaatgtattatacactattctataataaaccaaccctgaataatgtaaaattaatcccaactaaggaaattagggataaaaggggaaaagtgaaatgaatgaaaacagggaacaaattcttaacagaaaaacagtaaaatagatgaaaaaaattttcaaattaataaaatttagaaaagttcagttaaaataattacaaattcgttttgaattggttattatgggttggatgtcaattaaagtggattgtgtttgtgaataatgtgaaagttgaattgagcattgttgaagatggttggaatgtctagagagttatattataagtcatcttccagtgtttggagcaccagagaacgtgaaaagaattggaaaataaaacaaacaaaaaaattcaaagcgaatttttattattttttaacattattttatagacatggggatgatgcgctcttatcttaatttttacaccttttaacaatctattctccatttattctatgtatttttattctgttttattatattatttttatatcatacatattcactgtaacttcttccttattttcgtctttacacatttattcattccttcccttagttcatttgtttcattatgttaatatatttttaggctataaatacgttaatttatatacacactttaataattacgtcaatggtattttacacattttttcttccttatactatatacaatttttcggcattttatttcaatttaatattagttattctataagaggaaagtcgtttacaccaataatacattatttacatatttatatccaaatagttatacaaataattatttttagggaccaacaacttttctttaaaatctcaggcaaatagtgaacttttgggcattttaaatcgccgctccaatacatttaataccaaacctattctgaccgataaattgcccatttcttcaaaattatcttctggcatttataccactttacccctgggccatcgaattattaatcgcattaccaatatattcaaggttgaattgtgtaaattaggtgctgctcaattgtcatttcccctgctaaacccagaaaaagttgtttcgaatactggaaacacggttcttgataatgatttattcaaggtatcaggaaacggttcggtagaatatagattatctggaacctgtgaagatttgtgtaacatagtgttgaaaaatgaaatgattccgttgtctaaattgcaacttccagtactgttatatcaaataaacacaaagtttcgtgatgaattgagggtgaatgagggaaaagtaaggctaaaggagttcctgatgcttgatatgtactctttacactcctctgagcaatgctctgacagcacctataccctggtgcttgaaagttttgccaatgtactcaggctactgggattaaactttgcaacagtgaattgtaataagaataacatagtttcagacgagttaagggtacagcactcccataaccacgaccaaaattcaaacacagtattatagcattactataaatatatatttcaaaataaccgtaaattatactactataatcagtattattcgagtaataattagtattagttgataagaaagtgaactggatagttcagtagacatttgtggttgatatacctttccgtttaactataaccaaatacttttttcaatagttattaacacgccatattaatgatttgtttccaggaattggaggttggtcatttatttaagtttggtacacactactcagatgtatatggtctgaaatttgaaatttccggtagaaagagggaaaagttgtacatgaattcatatggcattggcattaatcgacttctgaacgtgttaattaacaattactcagatgagttcggcatcaaactaccgcaactcattgccccttacgatgtcactatcatagattccacaacaaacggtacaatttaaccttaaaacaagatcattttttaaaattatataaaaacataaattgtgattaaaatatgtattaaaatggtgtaggagatggttgggagataactagaggattaatgaagaagggtttgacagtattatacgatgacagaagcgagacgataaagaacaagcttctagattctaaaaggataggagttcctcacattcttatcctcggaaactcattaaatggtaaaaaaacatttaacaagaaattatgggaaaatataaacgaaaattgcaaaatatcaaactattacaacttacacagaggagtggagaacgtattgtacaaaaatgataatataaatctaaacaattatagtaatgttatgatggaatatcaccctagaacaggcgattccagctccattattaatctttcaaattttttaaaactcctcaatatctaattttactcatttacagtatctaaaaccccgtaaaatttcatagtatattcattggtgtttactcgtgataacaaacaaatcgggatttaatggaaggaagcaaattataaaataggtaaatatggagtaaaagaatgtagtttggagaattttggtaagtaaatataggtggaaaaggtagataacagtgaaggtggtattgtgggtaggaaattgccgcatagtaaaaatattaagaacaaacagataaaaattagataaaaattaagtttaaaattattcgaattaaaattgatttaaaagcagttatcggacacttttaaacctttattttaaaatgctcttttcacacatttgtcactctcgctcacaatagtaacagaaggaaacattaccaatgggatcctacaaatgggccgatgtcgcaagcagcgaatcatgtaaaattcatatttaatctactcatttacttatttaattttatttagcctttaactattcttgataggagtgctcagctattataatagtatactaatcatttataaatatactaacttagttaattatacaatatacgagttaaatggatgtaaatatattttaaacacgaaatatattaaatattctaaaacatctattacctgttgtcacgagtaaactctagtttattctattattagtttatacaatccacattccggtgactttattatgaaataggtgcatcatttggacgtacaacactgatgttattggaacgacgtgagcgttatggcactcacaagggttacctcgactgctcgaacaagttgattgatggcggtcttggcaagtcgtctcatttcatgttcttgcctaacgactcttacattgacaagaactctatccctgagttgcacgagagtaaacttaacctcaacaagattaacatcaacactaacgtcgagaaccccgtcacagataacaacgtgttggacgatgatctcttatcaccattactctacaccaattctgacctcccccctgataataatcccaaatcattcgcaaactttctaaacaattccactcacactcccaaccttgtcaataaaactaactcaaccaagtcaaccgaaccttcattaccgacacgagcaaagtatacagctaatacaactaacattagtaatgttaaccctaaaaatgttaacctcactaattttaaacctgttagtgctaactctggtgaaactgtcaacagtagtaaggttgataagatatgtaatgtaaatgatagtttaagagaggaagacaataatggtagtataagcagtcgtgttaaatacaaacactcgttgaacgcgattaaccagttaaaccacaaggctggtgaggaaaaagatttatgtgataagagtagtgtacagaaggggcctgataaaatgtgtaaatcaggtgaaaagcgcttgaacagtggtgttgaaaattactatgacgaggagacgaaaaagataatgaacccaacgaagaagtttaaggacggtattaaaatgtcaaaaaaagaaaaggaagagatatctaaggtactgcttacagagctgaacaagaaatctaaacccttactgaacgatgacaatactcgcttttatagtcgtcttaaagatatcgctataggaaaggcaaccaaagtatttttcatattagtcaatcctatctcatctagcttcataacacctacatatacttagttatatattctatttattccagtctgatcaatttttctctaggtttatgattaaattgttaaatttagctatttttaaaagtatgtagttaagtagttaggggatagggagtgtaatatttaacagggttatcaaaactatataagaatggtgcctaaggatgaacgtggacctgacgatcctcaaactccaaacacaaaaaatgtctcagcctctaaattcagagcaatgtaccgttcatggaggacacagttacacaaatttgataatatcaaacactaatctcttccaaggaccacctaaatactgttcaatatatttgattctatccgattttacctatatttagtttcattctattttaatttattttgggtacaatttttgtattttcgaagttaatttaattattttaatagagtgaattcgttaattatagaataataattatagggacaattatttatattttgagaaaaattctattttagttcacacattttcctggataacttatacttatttatatattgtttagaggatagttgtagtttgattagaattaatttagtgtaattgctaaaataataaaaacatacgtatggggagttggtgtcattaataaataaattaataatgtagaatatggatcaatgagggtgaaatgagtgatatagatcgagatatcgctcaacttaagaaatgtgaatatttgagcgaaaacgaggtcagattactgtgtaataaagccaaagaaatacttatcgaggaatctaacatacaatatgtagattctccagttacagtactaccatactaatatttttacttatttatatagttatatagttgaatagttagtactctaggtattggttatgatataacattcttcctataggtttgtggcgacattcatggccaattttatgattttaaagagttattagaggttggaaatgacattcctcagacaaactacttgtttatgggtgattttgttgatagaggttactactcagttgagacatttttgttattgctttcctttaaagtcaggtatcctgaccgtataacccttatcagagggaaccacgagtcaagacagattacacaggtgtatgggttttacgacgagtgtatcagaaagtatggaagcgtcaacgtatggcgttactgcacagatatattcgactatttctccataggagcccttgtcgacaaccagttcttttgtattcatggaggactttctccatcaattctcaccatagacgagataaggtgtcttgacaggaaacaggaagttcctcatgagggtcccatgtgtgacttgctctggtcagaccctgagacaatggatggctggggtgctagtcccagaggggcaggctttctctttgggggtgatgtagtacgccagttctgccaccagaataacattcaaacaatcgcaagggcccatcagttagtgatggaaggatataaatggtggtttaacaaaagtcttataacagtttggtcagcccctaactactgttaccgttgtggaaatatcgcaagtataatggagttggacgagaacttaaattgcaacttcaaaaaatttgaagctgttccacctgataaaagaggcgttcctgcaaagaaaccacttccggagtattttttataatcgttttctatgctctaatctcacatgtcaattatttactttttcaaatggattttaagagttaaccaatacgtttaagatactgtatgattggttctacaatgttttatataattaatatcctattaaaatgtattttataggtatataaggtatagtattactagtgttaggtagcagtccaattatatactttcctgatcaagtcaaggatcagtatagctatagttatttattaatccgctatagctattttaaattattccaaggtattgcaatagtaacttataactctctgccttgatctatttatcctatttccaactttagatcttgaaactcctgatgatccagtttatttagatatgagtatttatgttaattataaaaattttaatatatttaacagtatttaatattcctgatctccctttaactcaaatttcgtttcttaaataaccatgggaggtttttattcaaaaaccttagactctgaagaattatcttctatttccagtgatattgagtcaaaactttcagtttctgaaaagccacaaactcatgatcagaaagtaactaatactcctaaagttatttcgattaactacactcctgatgatgagcaagaactaaaaacacaccttaactctgtttatcgtttattgctcaagaagcgttttagtaattctgacatcttgtctttctcttctcgtttactatcaattaaccaatttaaacctcccaatcagaacggttcagtagcacataatctttatcatcgttgcggtggtttttggggaaaagccaaacgtgtttttgatgacatagtcaaagattgttccgctgaagaggataagactagattaatacaacaagttaaaaggactcccgaccatctaatttgtgacaatgaaaaggatttgttaataaaatttattgatcgtactattgacgaatctgaatttgagcaattggtagaccgttttaaaagtcatgttgaagatgccatttttatccatttttcagatattgtgctaccattttttagacacgttaaatcagatcttgagtctcgtaatttatacgattatgactttgagttgattggcgattttttcaatctggatgcagagagactaatatatcaatttgttatgagaaacattgaaggtaatttggacgacgatacttggtttaggttaaaagattacttctataattgttattatcaacattttgaagattatctaaaccagaaaataagtgaaatttattcattcaacttcgaacaacaaactgataccaagaacgttgaatctcctgacttagtttcaaaacccttagactctgaagctcatcctatctccagtgatattgagtcaaaacattcacctaatgacaaattagaaattgatgatcaatccgttgaatctgactatgaagattttgccaattctattcgtattaactacactcccgaggatgagcaagaattaaaaacacaacttaactctgtttatcgtttattgcttaagaagcgttataacgatcctgatgtaataagattttcgagtctttcaagtcattcaagtcatattgatgaatcaataagtagcattaaaaacgctccaatttcaaacattatattttatctttgtggtagtactaaagatagagccaagggtatccttgatgatatagtcaaagattgtattactgatgaggatagggccagattgatagaacaagttgaaagggctcctgatcatttattttatgagaaggagaaggatttattaataaaatttattattaatactattgacgaatctgaacttgctgaattattaggcattgttatggaccatattcgtcgtgaaatttctatgttttcttcagataccttgctggcatttttgacggacattaataccgattctggctcttgtaatccatacgaacatgcagttagcttaataagtgacaaaataaattcgcaggctgagatacgaatagaccgattgcttatgagaaatattctcagaaattttcgaagggatttagctaagagatcggaaacacattttactgactttaatgttgatgagtttgataatcttctaaaccgcaatctcagtgaaatttattcgttcttcaatttcaaaaaagctgatgctactgacgaccttgataaattaacaaccataacataacactactttaccctagttttcttgactttgcccgtataaagtcatccacaactaactatactaaatataccacactactaatatcttatggacttaggctcaaattctttaccattctctaatcttttattaattataaatatattcctactcatacggctaaactacagatttagatattatagctaacacattttagtctatagtatacatataacacagcacggttaaggcatataactaagtgtatcagtatagtattttataagtagtccatggaacaaaaatattactaaattgaagaaagttaattagaccaaagttaacaataaaaaacttgttagaataaagagcagtaaggagtttaaaggatgattttggcttataagtataatatgtaaataaggatcaaggtagtatattggaaaattcatattcttgtcttcctcggcagaatcttgcgagtctcatgtcatctactctgagtgtgattctcttggcatgatgtgaacaagctgttgaaatttcgagaagcttagtgatttcatcctcagtagctacttgaagagcagctagggcctctacggtgaacctaatttgtcctgaaccggcccaccaattttgtgcgatttctctaacgattctggcaaagattgcccttgggatgagcatatgtgtacttttttgataggccataatctcgcgttcgatgcgggtcagtccctggcgtttcagggttttaccggtcgagtcacggcttcgaccgaacttgtaacccttgggaatggtgatctcaccatctttattatagtgcatcttctccgacggacgcggtaacatgctgttaatgcgatatcggattaaggcgtcaaatgcctcgtcattggtcagcttctgctttttatattcggagattatatgggctgggttcattacaggcggttttgtgggctctttctgaacagttgctcttttagacgcaacaggagatcgagaagtcgttttactaaccatactagggcgggaagatatgtccctattaagtttaggtcttcctctcttcctaacccttaattctggtctcacacttgtctcagataccccaggtttatcaattacaacatctttatcaagaggagcaacagtattagtatcaactgtgtcgatattgttaccagtattagtgtcagttgtaacctttgctaaatcatcaaataattcaggttgtgactgagaaattggttgtgatgattgagtttgcggtgacgatcgtgacagtgtactacgttgtgaaaattgggaggcctcagttcgatgaggtgacggttgtgaagtttcagttcgaggtgattgtctggataatgaactaacatgagacggctgggatgattctgcgaataagtttaagcgttgttccgatttattaccaaattcgacatgaaagttttcaaaatcgtcatcgacgtcttcgaccacttcttcatcttcctcatccatttccctgcctataccattttccaatattatctatttcgcaactactttaaatatcttcaaacttaggtaatttcagttaaataaatgttacatgggaaaacaaatgtaaaaaacgatggatcgtagatgacagtatataattatttaataaaattacagcggctagtaatggattatacttgtaataatggattgatcaaaaggggcgcttcttaaattcgatggcctatttaagtcgtcggagttagatgagggatcagggggattaatatcaaattcgttaccatctatgctaacactctcaggactagactcatcaaatatatccaattcttccctacatcatcactattcaatactatctatatatctacttgatttttactagtaacaaaggggaaaatatagttttaaaatctaacaaaaattttggtaaatagagaaattaggtcacttagtgatagatagtacggttatggtagatagtattagataattaggtgggaaatgtgtagcattgtacggttggatacattttaagaaaatatgatacagattaaaaattaaaaaattaatatacagaaaatgatactgatacaattttactataacaattatatctgatttgaaattataaatagattgaccccacccatcgctgaacaaatctttttatttagaagatatcttaatttttagtttaatttaatcttctcttattttttaatcctgtttcttctacacatttttgttcttttaattatttttcatttttcagttgatttttccagtttcaacacatacttttatcattttattaacacaactctccatattttaaggagtgaaattagataaatagatatttccacaatatattaatgaaactaattttcttatggatataaatgttacaattggtttgttgaaaatatgttaaaattggttaaacttaatttccagagttggggtcgttttttccaaaaaggtcccttgttggagagtagaaggggatatgttcattttcagcggtctaaaccgcacgattttgagctgcctctggacaccatgccaaaggacattgatactttgatgaactctgaccctcagaagatggactactttggaagttactggtactggcgaataagaggagaatctactctcatggacactgatacacttcctcaaaagagctataaacagttggcaagggacctcgggatgcagatcgtttcagagccttcagaacatatgttagggttgttggagttgtatgagtatctgaaaacgtctccatttgtcggtccttttggtactatacaaaatccagtattggtaccttcagttatgactgaaaggtactccgtttcttacactatatttctcttgcaatctactctatttatccttcaggactggattctccagtcctttattaataattactgttaattattatattatatagttacgtagttaggagataaggaacgttaacatgtaatagggtggttggatgtactggaggaagcggtgaacacgaacatgttcctttgtggtttcgatgccgcgaagggtttttataccgttgtggagagtgtgatcagatttttatgcttgttagagtcctttattcgctaccagacggtgaggatcccttcccaccggaccccgacgtcaacgacgtctttgacaacgatattattgccaaggggcagtttaaatggaacactggcgattatcttaaatggcctttaggaaatgcaacctataaacaattatttttacaaggtactgctttggattctggaaatttattttcatccggacatgggccctagttaaaccttattttaccatactttgattatttaattattcattttttaacttaattattcatttgtatcacttagttttgaaattacataagtatatacccctatgctatatttagttataatatgttatatttgtaatactacaggggtgaccaaatagcgattactcatgtaatgtgtaggtaaatggggaaatgtaccaatggataattatgaagccgatacaagtgatgtagttgacatgcaaccacttcacaaacataaaaaatatacgcaactctagttactttagccgttaattaattttattattttacatttcaccttttccacttaatcctaatattttttacaaaattattataaaaattattattctcataatcttattaattgttaaaaaattcattctttatgcagtttgattctgtttattgtagtgattccaacactatgcacattataaaaaaatttctgtgtttttggatttttcctttaatgtttaatgtttgatatttgtgttaatttttccattttacacattattaccaatttccaccaatatttatttttttctccatttatctgtattccaccctcattcatataacttcattccttatttctggcattaccaccaagaccaatactaataacagggctaacaatattgaatataattcttttgttagaaaatagtgttatatcggaacatgggttcatttttcgaagatttggtgtataaaccactggatttaaattttggcccagcagctttagccagagcggatccctatcctgataaacttgacctttcacttggcgtctatcgttcagagcaaggtcaacccgttgttttcaagtaccacttttcaataattacacacttcggggcacacatttacctatttattagtaaaactatcaattctcaactttatttccatttttgattatttttggcctaattagtttgcttaaataatatatagttagtacggttaggttatgtaaatggttgtatagtgtcgtggctgaagttcgtggtatgatagcaagcgataaggctcagatggaggaatacctacccttattgggcaatccagatttttccgaggtttcaagggacttactgtttaagactccagacactgacgaggccgagtacaagttactctgcgagaggatatgttcattacacactgcctctgccacaaatggtatttttctcgggcttttactactcaaatatcacatcaaacttgccaacgtatttttaatcaccgccactactatttatttagttaaatattattagtctttaccagtaacgacagagaataactaagtgagaatgtttttagagaacacataccagtaacccttgctgggtggggtatccaacaatagttgataacgtcggattacaatactgtgagcacaaatacctcaacttttctgactcgaccttggacattgatgggatactatcatattacgaaactttggaacgaggtgacattctattgattcaggtgtctggacataatccttgcggagtggacccgaacagggaagagtgggagaggatcggagaggtggtcaagaggaaaggcctgattccatttctggatattgcttaccagggttatgcttcaggtgatattgttgaggatgccttccctgtcaggatgtttgctgccttagaggtcgatttcttcgtatcgcattcattttccaaaatgatgaccatttattctggcagactagggtgtttgcacgtggtaagagtcacttcagatgattcctgctattccttaactatgcttgattagatatatttatttttgttttactttaaacaaacttattcgattaatttatccatatttaaatgctaattgtaatatgtttgttgaagaatgtgtaggtcttgggaaggcgtgatgaaaagttgcgtgaaaatgtgttatctaatctgcgtcacatggcaagaggaattcatggcacacctgttcgtttatactctgagatagcaattaagatactaaggaccccttcgttaaaggagaggtggttagaagaactcaggggcgcttacatgcgcatcagaaacgcccgagagcttctatacaagcgtctaaacgagctcaaggttcctggtagatgggaacacgtgattaaccagaaggggatgttttgttaccttaacatacccgaacgactagtccacaaattgagggagaagcaccacatttacttaattttcaattcaaggatttgtatagcacaattaaataacaaaagggttgaaatatttgccaaagctttgaaggatgttttggaaaatgagtaatttagactgtttcgagagttacctcctccttatcactacaattctacaccctttatcaccattccattacacctgagataaacaattacacttttcatggagttaatttttgttttaactaaattttgtcagtttttaagtttattttatattttacttaaattaccacttcgctgaatttccctttctctagacaattgaaccgataaacagataaaatatttataattattaaactttccaataatacaaataaataatggtgtggaattgtgtaattgtaaattgttgtgttgaaccctttacacattggggtttacataagatagagagacaaatatagataattaatctagtgtaatattctgttttaatgtattttaagcgaattttgcgtagaaggcactgggagctcttgaagaaggagttggttgacaccttctctaatcattctcgtgacacttccgtgactttggaagttttgccatggccaaaatttgttcagaaggaacaactactatctgagggtttagttccagctctaatcactgattccgggccactcagaaaaatttgcattaaatcacatctgattcaaaaattggctttcgatgaagcttatgcacatctaagttaccttttcactggtagactctataatcttttggttcaaaatgatggtaaggatcagcatactgaacactctgatgataatgttcctgagaagtgtgtaataagtgaggttaatagtgatcctgttgagaaggtgatttactttataaagtttaagagacatattgaaggtagaataacagaagttaatataccttgtaccattaccggcttatttgcttctccagcttatcttaaaggtttaacactactgttactctctactcctatttatattcatatatataatttgtggataattatataactataggatatcatgtggaattgatgatgcctactataaagtgtgaagttgttggtaagacaatcccacctccatttcaaattgacgtttcgtctctcgactacacacacccatttagttcgatttacttgaaggacatcttacaccttttaccttctgacgactctgtgtttttccacagagattatgacttggatagtcaggaagtggtttgcacttatttacccggaactttacccgagcagcctcttccgacagattatattgatccaaattttattaataaaaaggggaaacgtatacatttaacttacaaaggatactggcctaaacaataattctcttgatttattcctaaaactcaactcattatttaaatttcagcctatttaccattttaaactgtcaaattatttttaaaatttccacaaataatctaaagttttatataataattatatatgaatattttatttttatttatgtattttattctcacgctaatattttaattttttcataacattcaaataatttggttattacgaagattatagcaaataaaataagttcatgaacataatggacagtatattaagtgatttacaacttctttactttacatgatttgatgattgtttgggctgagggttttccagagtctgttccggtggcctcaattgcttgcagagtatactcgccttcaagcaactccccaaacacaacgtggcgtccgtctaaccaactcgtagcaacagtggttatatagaactgggacccattagtatttggtcctaaacattcataattatttaaggagtagaaaatatctgtataactaagggttccagaggattgtatgggtgttttacctctgtttgccattgcgatgactccttttttatgttttgctttgaaattttcatcttcaaaggtcccaccgtaaatacttattgatcctgttccatttctgttaacaatgtcacctccctataatacttattatcacaaacacgaacaaattaactaatactaactatgtatcatctgatttgattaattctagtaaaaaacaatttcaaaattaggaaaattgtaaataagtatcaaaagttgatcgggctagaaaaaattataaaactaaataacgagaaaaggaagggatgaatggatgagaaggaaattacctgtaccataaagttaggaataactctatgaaaagcggaatcgacataagaatagtgtttatcttcgattttagtgccttcgcacaaagctatgaaattattgacagtctttgggaccaaatttccgtaaaggcccacaattagcgtctctggggccttctcatcagtctgaacctcaagatgaacatgatgtgtaactgggtggctaggttcaactggttttggtttcctacatacggcacagcttattactagtaataatttcaccaatgcagacttcattttttacaatatctctaaaatacaaatttagtaacaaaatgaacaataatttaactaaaaaaacaaaatctaaatgtaattctcaaaaaaatatgtggttggaaaatcaatcatgacactatatatataattagtcacatttttttaaatttatgaaaattttatcacttcttgactaagttattattccaaaaattattttaagaataataggagtttttgaattttacacatttttttagaaaaatgtgatatctaatggagactgataggtgacacattatttacactaaatactctattactaccatttacgcaatatttatactccttcaagtactaagagtttattttattctctaaataattataaaaatatatactgtgcataacattctttcccataatcatgctactatacacgtacatataatagtttatatacataatagtatagttaatagataaaattaatgagtagactgggtgttgacttgtctggttagagtctattcgtcgttttgaagttgatactttagcgaaggtttatagtggaacttaacggtaattttcttttttgttttaaagaaataagtgaatgataagggtttatggactccttcagtgtatttccacaccactctgttattatgtctaagttcagtacaaattatgtcatcgttaggtgtgtatttcaatccagttttttcagatgtctggactctgtactccagaggactgagttttacagtttctccctgatcatttctcttgtgtaaggttagttcaggaggaatttcgatggtttgtacaatagagttgggattttttgaatcgaataaaaggattttatcctcgaaaataacttcaagtcttccagtttcttgtctgtaaacgacatagagtggtttctcaccggtattacggctccaaattactctatcatagtatttaatcagggtacacactccatggctaagggtataaacaaatttaatacctccttttgtaaacatttgtaaattatagtcatcggaacttagttctctagtgttaccctcgttatcttgagagagtagtgttacgggcggaatatgatggtgcttctcaatcaactcattacctttcaataggtaagtgataaatttgtcatcaaatttgaattcaaacgtcttgaggttggaataacaactcatgctcttgggaaaggattgccctggttgatgtctacaaattgtcttatcacggtacttaaccatgtcaaagtttggctcgtttgtatagtccagtatgtatttatttttatcatctattgacacattttcgataaaaactggtatgaatccatcaatctcatccttagcgtaatgcgttaaaaggaaagggatttgagttttttcaatccacatcttattgtactttgtgaacttgaacaacctaccggcctcaacaactatactgtcatctgcaaatttatacaacagagttactaggaatcccttcaaataagtttctttcgtccatacaatatgatctcctatcattgccctaacacactcgagttcctctctcactctaattacccactgtgttcctccagctaaagttaaatagtcactatactggtcacgggttaatggaactaattcaccattaactctgcggtacagtgttatttctggaatcttataggatccaactaccccgtagccattctccagcttatacccaataaaaatattaagaatttcgaagaaaataatcttctcctccttatagaaatatattgatttgggggctgttattttgttaatgttggcacggtgtcttgagctgacagaggttctataatcagggaaaacactttcaataagcttgtaaaggaaaagaaacgtgtaaaaagtctctttataacctttacaaaatataaatttgtcgatattttccttaaactctcctgctatattcctgagactcattccaattacatcagttacaacactgttgtcctcattagtactttctgagtgcggactttggtatgagaaactactcagagatgagtttacagtgggaataaattcagttattagagtttgcccagagggtatttcagaaagttcttcaaacactgacttgagtatctcaattaaggtttgaactaaagttagggtattttcacgcaatcttttgatgcctctaataagtattccttcggactcaagtggtctcttcgaagacacaggacgctcaatgtcaccagcaataatttcagggttatcaatacctaacctctgcataattgttttaggcaaattaatgtaagtttaattatatctaagttggattctaaaattttgaaaaatctgaaggatgttattgatgaacacaataatccgaagaataaccttcctacacttaaacttaaactcagttataacaatcaattaatacaattctactgtacactggagataattataatctctgtaacaagaataggacaaatgtaatttctcaataacaaatcactacgtgatataacaatacgaagactcaaataaacagttctttctaataacaaatggtttaccattcctcaggatggtactaaattgaaatttaatggatttaatcatttcctgtttaacttttaataatattatttaatgatagccacacatttcactttggattttatggtttaatatataaatgtgtactaaataagacaaaataaggcaacaatttatgctagaatcacagctttttattacaacggagcgaattaataatttaaaaaatataatgaaaaattactaatttataggaatatattaatagactactaatatacagaattagataatttatatttacaattaattatattacacatgtttatctaacattactcacaccccatctgtgttatttgatcaaaaaaactcattttgaacaattaattttttttattttttaaaatgtcaactgatatgaattcaaatttcagccaaattggtcttcaattcacaaagatgtattaccacttaatggagactgataggtgacacattatttacgctaaatactctattactaccatttacgcaatatttatactccttcaagtactaagagtttattttattttctaaagctttgttattagtttgatcttatttcttacgactattactctatcaatattatcatttcttatagaagaggactctcccaattttatacaaatgatagtatgatgacctttgaaaacaattcgttcaagggtcaagctcagattttggagaaacttttatctaacccatcatcgaaatacgcaattcttacttgtgacttccaaccttcacctaacaacggtgtagttggttttgtaatgggtaccttcacatatttagttctcttgaacatctagtatacctaattatcctaagactgatcaactcttcacttatttcagtacctctaattttactttataattcactaattttgtaccatattataagttagtactacatctaggggattggaaatgtattattaggtgatttatctgtggataataatccgcccatgaagttcgcacatatgtttcaattattccccaatggaaactcgtattttggttagtattcatattcaaattcattttactatgtattattggagtatctacattaatccttctgcttcaaatattgtaattactgtttctcttcttttactgttgttattagtaaacgtttatccatatagtttttatagtattaattcatattgactacagtgctaaacgatatatttcgattatgtattggttaagttggagtaattctgtccatcgctttagaaaaaataattattcaatttttgatgcaaatttacatattattatctcgataattgtctaaagtggatatatgttactggtggggacttaattcttagtaaatgtgcaaagttacgtatatttatcataatcactataaaattatccatatgccttaaaataatgtaattttttgtacatgtaaataatttgtgtatattactatgtttaattcagttttctaatttttgtctaacttctaaattcagttccattccacttacacattaggaataaaattaatgagttttatcagttttttgttaaattatgaaaaaattttgttttctccaaatcccaccgcttctactcgctttattcctcttcaaaccctcaatttttattactcagcgtatacaactggcaaatgccctgcccataaatgataatctactcaatatactccaaaacatagatcaagaatctaatctatcaaataatacgagttaattctttacacatttattcaattacttatatttattctattatttatatttattctattattataaagtgtgttaatatattttttagagaaggttaattttaagctgttaataaatccaggtattaagattgatgctaaaggagactatattcgctacaacaactcccttatttatattagtcatatctttccttatcaatctttagctttatttactattatttcactaaattatgttaattttgactttaaaatatatagtatagataattagtggaatagttaagttagtttaatgattcatagtgggcaccgatgggactgagttaacccattatctgaagcttaaatcgaccctttggcttacaaatgacgaattcacaagtttgaggaattacttaggtgacagtgatttgtcaaacgcccttaaaattcttagacggaagttttatagacgctatgaatctgaaaatttacccaaggattctctaaaatacaagcttctctctgctctagctttcagttcattgcaaggcaagattaatgtacttaaaaatgggttaaacgatcatgtccccgagttattattgctagtttcaggtactgtgcactgcagatgattctttcatttttatatagcagttcctctcggactcattatatacttatgctttatatagttacgtaaataatatcactatttggcctagtgtaatattgttgtagggtatgtgagtgagcacaaaagcgctgttgactggaagcctttagaactggatgatccagacttttcttttaaggttgatactggcaacaggcccacaacagacctaaccccggtaacagtaacctccgaatacgacccaaccaaataccaacatattatattcgattcaatcaagcttctcaatgatagcactatccacactcctaccactgaactccctaaacagtccacagtatctgaagagcctaaggctaccgaaaaaacaacccaacaggaactagaaaccgtcaaaaaagactcagaaaaagaattgactttgccaaaacctgaacaaaccaaagaactcaaaactgaacctacacctgagtctactactaccaataacacgcctgaacaaaccaaagaactcaaaactgaacctacacctgagtctactactaccaataacacgcctgaacaaaccaaagaactcaaaactgaacctacacctgagtctactactaccaatactacacctgaacaacctaccagtactacttctactactgaacctactgctacacctgatactatcaataacacgcctaccaccaccactaatacttctactactgaacctactgctacacctgaacaacccaaagaagaagtttcacttgcaaaagatgaaagcgatgtgaatagtaataatagtaataatgtaaaggatagtaacgtagtagataaagataatccaacaccaactgaagaacttaaatcattacaagatcaaaatccatcgcccaactctgataatacctctatcaatgcgaacagtcctccggaaagtactgaaaatgttgatagtaccagccaattatcggataatgaagaaactttgaaaaagacgccgccaaactctcctactgattctactaccacaaatactgatgccagcagtgacgagatgactgaagagttgagtaacgtggtcaaaggagatggaactaatttgaagaccacgtttaccctgagcaatgacaatgacgagaccacaaagttccacaaatcgaaaaatccgcctcctgaacctacgggtaattctacaaactatttcaaacctattttcaattattttatttatatctagactacatatttattcatgctctattattaactatatataatatagtaatacattatacacttaaataaatgagttaataatgattagatgaatctgcgagtgaggcttcgtctgagcctgagtctgagtcagagagtaaggagaagtcgaatgaggacttattaaatgaactacagaagactcatccaccctataacgagactgagcttatgaatattttgcacaaagttgacactgaggatgtgcagccttccttcaagtcccctttaacaataactcttaaaatcactttcttctccagcgataagaggatatcggtacctgttgtaaccactgcttctcttttgctcccagagaccctgttcacaatgtgcttgcgcgacgagctgacacaacagtgtgcgtttgagctaaaggatagactaatggctaggtttgaggacgaaaaatctcaggcctttaaatgggcacacctagtttcacttctacaggccttgtcccttcaaggagacgtattcgtggagaagtacgtcatggtcagtggatcagagagcgagattactgtctcaaagattgagatgatcctccccatgaagtcattgacatttttacaacaacttgagggcgaggcttcaagcaccaaccaagagtctaaaataacatttaaacttcacaaaggggttcttaatataccagtaggaatatcacccagtgacataggccaaaactacggagtacacgcacaactctctaggttcctcgaactctatggagattttgaaatcacacactcattgtttgacctcccaacccagaaaagaaacaaacctggaaaatctgacaaaacgggaacatccagaaggggaactgaagaacccagtaaagtgtacaccatggatgagttgttatcaatgaacattgaaaccaaagacttaaataataacatacactacattctttcaggtatgtttaactctgtagtaacatacgtaactctttccaatacccagttctcaacaccaaatactctccaccattattgttatgtacaaataaatagttattcaaattggtaaaaaattcagtgaaaatagttatatattactaattataaccatatttatatataaatactgagtttgtatctatttttaggatatgagaaggctttgttttcagtacctaagaggttgagtggatataaattagtttgggagactgttgataagtaccctgagcttcaacgactctggattgaagctttgactttgatgaagctgatggataaaactgacaatcttaagaattttttaaataaccatacctttaaatatcaggaattgaaggacttgtttgagataacttacggtatcatagctgcagacaattttgatgaggcaagagacttttatgagactgtaggtataactcaaaaggatgttgatatgaacttgtcaagagtacgaagtcttttctttgcgaaaacaggcacaaacgttactagacttcctccaacacttaagccaatgcaccccaactgtctcattaataatatgataacttcattatcatcatatgatctaattgagagattacaggtgatttaaattcactcaattacttctataactatacttattcttcaaacattcacttagccttattttatctaactctaaaatatactattaggaggaatataattttgcatataggtaatgtatgtacaatggataaatcgttacaagaatacaacagatgacataaactatgaccttgcttttctatgtgctggttcttcagttttattacaacattggcattattttcaactggatcaacggtttcacgaccccccggtgcctttcataaccctaataacgtcgttttctcgtctagcacagggtaaatacaaaaatccggaacgaaaggaagagattaaggatctgatcaactcgaatgtagcaaaaaaatgccgcaaatatattaatgcggctggcattttggcaacgtcgccttacaagactgccaccataaacatgcaacctaagtctcttcttggagccattgggaatgctcttagcgtatccatggatgcacctgctctagaggttgcttatgctatgaaggactatttcaaggccgaactatccaaaggcaagtttggcaactctcttggaatttgtcttggcctacagcttctctaccgccttaatgggtgcctatctattgagaggtcgaatgatttctcgttatactctcacaacctgttaaccatggatacgagggaaatattggaaaaatacacacaaatcgactccaatactaagaacattaataagtatcaccaatatctcaagttaggttgcgatcccgacaatattactgtacacgaatcgatgtctaagcttatgtctttggtctcaactcagtctcacttggatttgatggatgagctagttcgtagggagatgctctcaccagatttcactcccgagggatatctagccgagccagaggtttcttccaagtctgaccttgttgacctggaagatgatacaacaactcttcttgaagcctttgattccaacaacaccaggtcgctcctcgaaatcgctaacgatattgaagagggcgagggtgattccgaatctcttgaaacttccgattcgtttattgaattagataattcacacaccaatagtccctatacaactgaaggttatgtatacaacgttggtagtattggaactacaaatttgaaggaaatggacaaattatatcaccaactactcaacactaatttaaacaggtttacagctttaaataagggtttaaatactattaacaaactttttaataacaccaaccctagtacctccggttctaaccccaatgaatcttctgacaaaacatttggcggcataatgtttgatataagaatggaaagattagattcaagggatgatctaatagccttggatgtaccatttacgttccatgagaaagaacttgactttatcgagtcacttgagtctaagtctctactcaaacttctaatgtacaggatgaaaaaaagagttgaatccctaaccaattactattcttgtcacgataaggttaatggttcaggtgttgtgtttttagacgagttggtggctaaggcgaatgtcgacattggtacttacaacagtttattacacatatttgaattaatgcctgaggacggatattactttgaatacgaaggcctggtcataccaggcgacagagttggtaaattaactgcaaaacacatttacaaatcgctacaaaacaataataagtctaagaatatgaataatcactcgagaggcttggttttacaggttattgatcctgtcgatgaccgaggtattaaagaattaacaatgccaaaggaacacattaagaagcatgacgaattattttaccaaaaaatgactgaactttaattcatctcatgtacaatatataataccgttgtaatttactgattaaggtaaaataaaggctcaatatacttaaacatactatatattgtatattggaatagtaaattaagtttttatttaatctggagtgctatgagcgtttgataaatttgtggttatattttgtatcctttattaaaatatagaaaattaaccttgcttaaaactggattcatcttgtgaaattaaacttattttgtcattaaaaatattaaatcttttaacttttccatttctggtaaatatattcaacctattaatcaacacattagtaacaattatatccaatcctactgacccatcttctcttaaactccacaatttctcgtctttatattgtatcttagaacaaaccaattttgtcttaattctgagcccaaaattttcaaaatccacaacccaattcattaagtcgatttcacctccatcctcattaaatagcactaaatcggtggttttaattgttttttcagttacatcggtccaacttttagtttcagacgaccatttgtataagaagtgtttataaatttgtgaatgtaacatgagatatttaccactacccatatccagaagaaatacattaaaaatacagttgttggggtcatttcctgaccaaattactgttttggagctctctctgtcttcgaaatctatgattttagaaaacctataattaggggagttacatacaaaatttgttagttgttcacatttgttaaaatgatattcagaaggatgatttttattattaatatttagcattactggaactttaaactgactttcgttttcactttcatcacttgaactaacctcaataacagtattatcggtagcatcactatcatatctatcttcgctatcactataaattagcgattcactatcacaactgttctcatcatcggcaaaatatgaatggtctgtacaatcaggattgtcagtagaatatgcatcagattgtggaagtttgcgttttattgatttgtaatgattaacgtcaaagattttaatattgttattaactggatcaattgggaagggtttatggtcatcaaacgtgataaacataatatcatctattaggttatattgaaaagttttggcgagtttattagcaagtgaattatcgtaattgctttctggaaagtcaaattgaaccttataattcatacgaaagaagctaaggaaatagttgaattcatgatcttgtatgtgctttggatcattttcatcactgaaataaaattttaattttgacaaatctatccttgattcagtaatgtttacccattccttactgtcatttgtgtattttagtaatgaataattatagtttttatggattattccaacatacttttgtccgctattataaaaacacactgacacatacaaggctaattctaatggttctttagcctcccaaataaccttttctttaccgtttctatcaattgagtcaatgattttgttaaataaataattctgggtgtgactatagtttttaaatgctcttttgatccacttctgtttgttattttggttatctggtactttacaccagcttgtattagtttcactatacatgttctcttcactactttctttatttgagatatcgagtgttaatttgttcgtttcaacccaaattcctttaatgttagttaagactttgatatcattgttcatgacaaataatgaaattgagtttgtttcaagccccaaactatttctcgttacttttgttacgtattcactagggctttctgccttataaatcacttctattagatcgtctccatcagttgtgtcaaatattgtatcaaaaccataattttcattacatatgtactctcctcctccgtttgctatatcaaaatgtttaaattctttagttgaggtttgaactttcaagtccaatgatattggtacaatgtcacaactgcaatttatcaaatttttattcgggaaaccattatttatcgacattatgcttcatggacttgttttaccatattacaattaataatccgactgagatctattaattatataactagatctatcacctactgggatgtactatatacttcagtttccactcacgattataaatatatgataccgtagttttatttattttaagtttaaaatatacctaatttaggtttatttactgcttattcaaggtttatcttgtatatcaaatacaatttaagtaatattaaatgtaattaaattaatgcccaattaacagttggtgattgatgtatattttgtatcaatttgacaagttcttttactccatctttaagattctcttctccatattcattcttatcttcactggtataacttattgttgccttagaattatataatgagtgcaaatactgtaacacacttggtgataacattgccatatagaacttgagacatgaataatagggattatcgtacaaacattttattattctacacactttacaccttttatactttctaattttgtgttcatactccactattaaatcatttacctccctatcactattatcccttgcagggctggtatcattatcaaccatcctaccagtgatgttaaaatttgcattattacattttaaagtgggaaagtttataaaagtcttttgtataaagttgaaaaatcttgttttatactcgttgggtgatactattgtaggagcttgacctatatttgctaatctcttccctactgtttctatctgtttatcccatgtataaggcctatacaattagatacaccgtatataattagtgttaaataactacaatattctaaaaaataccttagaaaatctatcaatccgatggtgatgatggagagtgtcggcaatattctgagcagaagtgaatagtccacaatgttaatggacgagagaaactgcaaatcgttctttagtctgttatttattatattaatagactccccattcaattgtattggacaccccttagtgtatattttaaaattctggtccaataacacttcaatatttcctactacattaccaccaccattattggtgttattaacaggattatttgtattattagtgctaatgaatctctttaggaaaactcctttaaggtcaaaactgaccttaacatcattaaaataatcgatgttttgcattacaaagcagtttattgaggtgttagttttgacgtgggtcactttgaagagtccatacggcaaactcattaacgtcttattgttggtaaagtgagtaaaaaaatcaatacctctggatataaacaggcccatttcatgtttatttattaattttattgtaaatttcccatcgtatgtcatgaaaatcggggaaccactcttgccaattgagaacattcttgtactcctactcagtgagcgtatgaaattcatctcatctccacaatacttaaatcttattctacggaactggttaaaataataaattatcaagctatagggaccaacattaacctctttgtcacggctactttctaaatctctaattatctccttttccacatcaactttgttagtcaaccttttaacggtaacttcaatattacaaagttctaaatgaccagaataattaatatgcccgaatgctgtcagtgcattagcatcaaactttagcaaacaattatgttttatggagtcgaaaatagaacttaaactcttatttactaacaaccttatattatgttttagcactgacatatgcaattcgttaaggatttcgtataagtaatttataggctctgaagcattttgtaaactcggaacaacagaaccctctattttgtatttagggttttctaacaaattagtgtgtattattggtataccataatatggtatgttattacttctctttactattttaattctcttatttctgttcaacaactctcttatgctatgtactgtactactatcacacaatttattataatacacatcttttatatcaaatataggcttaatcgttctgaatttatggcttcttttagtgaatttcacatcaattacaccaaatattccacaaaacccacccattttgatcctatttatcatagcataatttgaacacagtcccactttatccactaatttgcaagatcctactccactaaaacaatcattaaactcatgaataatctccgtatttattgttttaacaagtgaattagagagtattgatgcgatatcacgcttcggctgtattattggtctataatctaggcagactattggactaccatatgcatgagtaaagaagtttaacttaattttattaaccaatttaatgtatagtgtttttttaattggttcacttgacaaatcttgtatccctttcaatactgaaaattctcttaaaaacaccaaatattcttccaaatcacttaagttattttcttcctggtcattcacaccacatgttattcctatatcaaaactattaattttatatactaaaaattggataattttacaataactaattattagtagttttataagcttaacagtaatataatgccaagtataattgagtaaaaattaccttgatttattttaacatatttaaagttttcggcacttgaatactgaatgataacatcgtcatcacattccttgaacttgaaattagaaacgtgatcaatatgtgagatttttctataattatataacagttgttcaaataagctataataacttatgtagaacgatttgatgattgtgaaaatttgtatcggatctcttgggcagtagtacttggcgtataagatatgtgtgaaaatttgaacaaatacatggggtaaattactctcaaacttagttaatgaagtataaaattggtccatttcactgaaaaattgttttatgtaatttactccaacttttactttcgcaattttgctcatcagctccttaactatccctactattatatatatccaattcaggatttctatatcacttatcgtggcatataattccatgccacacttatcacaggtatgtaatggtactcctttatttagtgtttgtttaatcttatctcgaagcttggggtttagttctatattaattgatgaatgtttttcatattttaacaaaaacgttgtgaaatctaatcctttaatttcctttacccactgactccttgacatattatcaactttatctatatttttaacccgtaaaaatgtacaaatacatggaatttgtccaactaaatcaccacttaacaaatttttataattttgttttacccaatgatatattttattacactcatttcttagtattacgcttattatactattatttactgggaaatatattccaataccatcacaaataagcatatcattagggaccaaaactgtatgaatagggtttagggtgttaacttgtgaattatagagcctcgtatcaaactgcggtaaaatgttaaagacagttacattagctaagtggaatgttattgtgaactgatcaattaatataataaacttatggtcataaaacaataaatgcccacaatccgatttatacaacttatttagcaacaataactgcataaatctaccaaatgttatattctttgttttataccttttactgctattacacttcatgcagtatatgtccatatttatttctgagtctatgccatgattataaacatcatcttcattgtagttatctagtgttgtaaaattatgtgttgcatgttgaaatgttagtgtcaatttcatgttatgtgtatttgagtatgatgtttcatagtgcagttgatggttgagaaaaggctctgagcagttgaggtttggacacttgttgatttttaaacagtttcgaaggttttgtagaaaattaactaaaaagttaccctcattaaaattacccacagacacatacacacgttccggactaccgcacgtttgattattatttgtgtaatatttgtacaatgttaatttaactacttttctatattctacggcactaactgtaccacttccactactattaatcatatttccgtaatatactatatcggtatcacctgcactatttactttaggactatcaacaaggtaatctgtgatattatcagccttaagtagataatctgaaaaattttcacaaatttgtgtattatcgtctatgacattgtttaaagctctattaactgtaactgttcccttaagattattgatgaactgtagttcttcaataatagcctgtagtctaattaatgtgattttaatcaattccttaactgtttttaaaatttctgaactcattaaatgggttgaaattaggaccgtaaatcctttaaaatagtccaaaaaccgaataaacaccatactcttcttattctctatgatgttacattcttcacatattcccatatacatgcttaaatctgccattggcatatttaattgatttttcacaaccatttgggctgggttgttctccaaatcctcacccgaatgagtaattgagcttattattgaatccaatatattacacttaaaggcataggacagcttattaatcatcagattgccaacgtttgatatacaaatcacgttatatctacttaacaacgtcgatatgtggtatggtatataattttctgctataattatgtttattccatattcacttattttttctgctaatttgttcaacttgttatttgtaaataaattagtcaagtttgaaatcgattcatatcccgataaatttatatcattttccagaaatacgaaattttttaataacaacaccttgtaatactgtttaccatgttttattatattatttggaaaatgtgtagtgtgtccaaagaagcaaaatcccttaaacaaaaacaatttgtcgccgcgtttaacattgaacttgtgtaacatgggctcagtgatatattgtattgtgataagatctaaaatatctctagtgaaatggtactttttggctgttatacatggattaaataccaattcaactatgtcctcaatataacttttattaacactaaccaatttacaatccttaaacaaacatcttttcaaatatatttttattatctttattatattctcatttataccttcaaaaacatccaaattatttttcacagtcctttcattctttaaactcataacagcaggattattatctgcaacgttatctgtatcattattatttaagtcatcattatatgtattaattttggatgttttcacaactctcttgtgtacttttttaaatttatccttgaaacttactatacaaacgttatatcttttcaacaatttaacactcttcattctcattaagtacttggatttatttctggtactagtgagtttaattccagaataatcgatggaatccatctcattattcatattctacacactaggaatatgatacaggaatttcattatttactaattattattcattatttttattaaaaattaagaaatacatttgaatttatttaccacatagtaataataataccaaatgtagttgtatgctacactatagagttgtcattattttttgtaaattttaattttttgattaaaatttatccttaattgtacttaaacatggtatataataattaaaaaattgtgttagtaattgtattataaaatgtctgacgagactctggccttgatcattgacacgggttcagccgtcactaaagccgggtttgccggctctgagactccgaaagttagatttccaactcttgttgcaagtttgtttatttttaatctagttttacccaaatatttcactccattacagttttaaccagtgtaccaatttctaacttataaaaaatttgattcatttgcaattaatttgtcatttagttgatggtaatcaagaatctgacgaccctttggttggaaatggagttctggaaaaactcgacaaactcaactcaaataaatcccaagaattggccagttttgaggtatacaggccagttcaacatggaatcgtcaggaattggtattattttacacatgttttatatacattttatcattactgattagtatattttctcattttcctatcctggacttttatacacattgttgactgttatttttaatattatgtgaatagggccttagctgaaagcgtttggcgtcacacattcactaatgagttaaagatatcgcaggaggaacatccggtgcttctcacggagcctccattgactcctaagttacaccgagagttgtgttgtcaattgttttttgagtcgtttggagtcccagctctgtaccttgccactacttctttattatcgatgtatggttcttcaaagactagcggtttggtgttggacattggcgaaggtgttgcacactcagttttgatacatgaaggctgtataatgccctatgcgataacccgtctggatatgggtggatttgacttgacttctcagattgttaaggctgttgaaccacttcgtgctaacactccctacgatcgcaggattgctaaggacattaaggagcagtgctgcagggtttcactggactttgacgctgagttagcagaaattgatcgagacccaactgctcactccaagacctttaaactcccagacggcactactgtgagcctttccagggaatgcattacttgtccggagatcctattcaagcccgagctttcttacaggcgttgtccaaatcttcctgagatttgttatcactctgttcgaatgtgtgaacctgagcttcaccgcactatgttttccaacattctacttacgggcggttcttccatgtttgatggattcctggaacgctgcgagcgagaaatctcagctctagtgaacaagaacgtgccggtcaaagtcctttctagttcccaccaacgcgacctttccgcctggataggagcttccatcgtcgcaaaccttcaaagtttccagcaaatgtgggtcactaaagaggaatacgatgaggccgggcccacagtaatacatcgcaaatgtttctaatttaacatctaaaatgcaataaatatacttttcaagtgatatattatatataatggtttatcttaaatgtgttttacgattccatattgtagattctttactaaaatggttaaaccgtactatattaaagtttatatcatgtaatttaatgattccaatagacttatcattttattcctagtaaatatgtaaaattttagtataatcatatcaagagaattgtaataccgagttaaatgatagaaaaatagttccagatacacacattaagaaataattacaaaatacaatctaattttactaaaactgatgtaattattgatatttaattaattgtttaaaggatgagtgattagccgttctaagattctaaaataatcaatctcatgtgaaaacatccccaaaagatttaaagaatagagtttgttatttgaaaatcttatcggtaatggaaaataaaattaaaatactaaaaaaaatctttaggagtttattaaatcaatgtattataaatgtattcacactagttaatatacaacagcaatataatttgttaatataaaataataaacaaatttattaaaattcaatcaaattagtcataatttttaaaaataaattatttttgttgtgttcttaattcttcaacactataccattttcattgctaaaatagtgtaatttttcagatttatttttctttaaaagatttttataattaaatgtaacatagtatcatattttctgtacttcttacttatctccgaatggtatcatttttgtaaaatattagtaatttaaaatgtctgagattcctcatacaaattctttaaatcatgacaaagatcatatttcaagttctaaagctcgagaacctgaggaagacttgcccgaaaagctaacgaatcttaagttatcggtatgttcttaaatttcttacaatcttcaggtgaatacgaactcagatcccactccaaattcaactacagattcctcttcaattagagcacgaatatttagaaggttttctatctcccctacaaactcgtacattcctgagcataagttttgggacacgcaacttgttactaaactcaccgacgttgttaattctaacgtaatactatagataactgtctttacttcttttagttaaatattaaaatgttttttacaactactaaaacatttgtataaagctgtaacttatcctttacagtcccatatacagttatatttttacagtattaatatttgtataggaatgtggtcccattgacccaaatgaggatgtttcaagagttaaaaaggtatttgattcttctgtagactgtgtttttagaaccctattcctctcccaaatgggtttgagtggatttcactcgatattaatgatgaagaagacagaaatcaagtaccatatctattatacgaatatattattagtatattatcagtgtatactatagagtaataaaatattggattataggtttacaagctgttgagtgagaattatgtagaagacggtgatgcgctgttcagatttgattataagcgtgaattcttaatttgggcactgacagtaccaaattataataaagattggcaaattggtgttcgagtttcatcctgcaaaacagtataaaattatccattctttataatttataacaccacacaataatgaatgtagttaattggatatataacggcagtgccagttaatgtgaatgttgttggcaacaccttgaaattagctgaagttaactttttgtgcattcacaagaaattccgatcaaaaagacttgccccagtcctcattaaagaaattactaggagagttaatctttgtggaatttggcaagcagtatgtcacttaaatataataaataaaattataattcttacaagcattaactaattttacagatttatactgctggaatcgtaatcccaagaccaattgccaaatgtagatattggcatcgacctcttgatattaaaagactcattgcggtattttacattatttaactatacatatgtttgagttttaatccattagtgttcaaagtttactatataaaactatattatttctctaatacaatttattgattaaatttagtctcgtttctccggagttgggagaagaatgaccataagtcgagctgttcgaatttataaagtcaatgatattcccgtacctcatattattactatacacttgtttaacccttttacatattagaattatttaatacaattagtataattattctcatgagtctgaataaaatattttagaacgttgaaatgagaccaatggagggtaaagatgtgttaagtctacacaaattattgacaaaacatctccagtatattttaattatttatacaatctatatctgatctctttatgtaaactacacaatctaattgcacaatttattgattatgatcaatgtaaaattttagaaactataagttatatcaagagtttgacgtggatgaggttgaacaccaatttatgccccgtgaagacataattcagactttcgtgaaaacagttgatggtacattttagcctttaaacttttcttaggtcaagtgactgacatgctgagctactactccctcccctccagtgttatcaataaccgtaaagtccacacaatccgtgcggcatactccttctacaacatagccaccaccatgtcattcaagtctctaatggagcatgcaatttatttttcgaaatctcaaggatacgatgtttataatgctctggatcttatggaaaattcgctagtattcaaggtaccctacacatcactacctgaatactgtttacctagctacatagttaatagataaattcgtatactatagttagttatttacttaatatattagcagtatattaatgtgaataggatttaaaattcggaatgggcgatggagaccttcactattacatgttcaattaccgagtgccagacgtaagaatacaattgactcatttgaacttagcttaaaccatccgacgttggaatagtactcttataatctttttttgttagaaagatcataatttattactataaaagttatacacaccatatttatatactggtatattactaacagtatacaatgtgctaagtatatatgtactatgaatatatgttgagtatataatatgttgagcatacaatgtgttaagagtatacaatatactattagtacattaagcgtttaaatcattcgaattgacgattaacgtgtttttttaaaacacccgcgacaattagtgggaaaactatggaagcatcggcgtgaacctttacagggtctgtgttcggtttgattttcccccaagaaacagcctcgtcgggattagcaccagagtctgagccatcatactcttgggcggtggagatgtaaatggcgaaatcagcgccgtttctcatgagattcgagttacaaacatgatgtttcggaagaccaccacccaggattataaggcctgatttcttacaccggacagccaaatcattaatggccctaatgtccttaactatatctaggtagagcgttgtaggactggacttacggtaggtgtggaaataaagattatcaccaagagaaccatctgtgagtccagggcaaaatacagggatcttgttcttatggcaccagtagtacaaggaagtttcgtcgtttatcctgctcccgagaaggtcaataagtgatgaaggagtccagatagtccctttctccacttgttcggtgtgcatctcgtccaaaataggctggagccagtcttcaaatgcacagtagttttcattagggaggagcaggttcccaattctgttccaacccttgttcctgaggtctgcgccatcaagattgaattttccaatgtaagtatggcccaggcacttgatcaggtcctcttcgacacctccaccactagtcacgaaaacgtcaactaatttgtgtttggccataaacacaaaggcttctcgaagaccacaagaaatcatattcgaagtgaaggaaacccagattgtacacttggtcttacggcggacctcaggatcggcaaaaggcgtcccttcgtcggattcgtttagcggatcgtctgaaagtcgccaagaatacatccggtccaccatctcggccgcaagtcccaaattcgtggcttgaaatccaaagaccctaaacttctcaagaagagaatctatggccagaacgtcatcgtactcaatcccggagactggtaacatgttctcagtcacttgagcattggtttgcaggactgcttccaaagcaactttgggaatggaattgtttaggttattctctgtcattttaaactaaaatttacaaaatagcaacttcgttagagtagttaagaatattttacagaataagaggaaatttaaactgaattagtagaatctattttagattaacagtagtattaggtatattgatgctgattatggtattttaaaaaataataaaacacatgggagaatgagattaaaataacaaaacaagtgaaatttaactaaaaacaaaaacaaaaattatggtacaaatatgtgaaaggttaaaaggaaaaggtgtaaccttaaaaatattaaactaattattatataggattccatcaattccccacagctaagagatcaattgcacaaatctgtactgttttggcctaatttcttccttcagaactttgtaaaattctggccaactttgtctaaatttgttcaaactaatcgatttaacaattgctcaaatgtagtttcaataattttgtcaatttttacacatttttttactgtacatacatgaataacttaatgtaattatagaaatcgcacctttgggcctaatataatttttaaaacaggatgatcgcattgagatgagggattgaagtcatgaataagcttaaaaactcgttcgaggcttctttgatttttgtacgaaggcgccttttatactcttcaagtgattctaacctatgggtggttattttatcacctcagagtatgaaaacacttcgtattctccacgatacgcctctagtcatgagcacagaagagggcttgagagcatttataagagtacacagcgctgctgagtacgccctagaattctcttcactttcacaccctaaatccataattactgaggagctggctaaatctctaaatctcaagtttgatataaaggcaaccgtttttttttcacaggtcaccgatgtttgtaacgcctcaaagctatgtttaaagtttatggaatcttatgatcctcgtgataatctttggaagtttcacactggttcttacaatagttctgtggaaactaaatctgtggagaataatcctttggataagaatcccggtagcttgtcaagtgatactgtggttgaagaatttaataaaaagtgtaatattaaatcaagtggaacggaaagttctgctagtatccctaatagtatgttgaattggtataatgtaaatgataatgtaaaactatatccctctgtagaatggtataattcattagttaataaagagtacaatcacgttataaaatcgagccttttgggttcagttttatttcaaaataatattatttcactcaatttaaatggatttttgtcaaggtttcttatttactccatcactaaatcgcataatcgcacttttagtaagtcctccactcactcagttgatgggaatacacccttaagcatcaataatgatactgaaatacaagtaataataagtgaaaaagtaaaagatgggctcaaatatgaaagtgagtcaagtgaacctaatgataacaacagtagtataatcagtggaatggatgaaataatagaattgtttaatacacatgtaataatcccactagttttggatttagatgttggacatccctcaggtgtattattgtacggcccgccaggtaaagagttttcatccacttctttatatataatcatttatattttaagttaattactcctaatttacctatactctagaatgatgtaaatatgtgttgtaggttgtggaaagacgttactggctcgtaaaattgccacaaattatacaaaattgtttaatttatccaattataaggataattcaagccaaagttgttctgagttgaaggttaaactggtacaatcaacagatttgataagtgagtttatgggtaaaactgagcgtaatataactgagctgtttcagtcccttagggaagaatccaagactagtaaagtcatatgttttattgatgagattgatgtgttatgcgttaatagagaaagtagtggatctgacttacaggcgaggcgagttctgaccacttttctgaataacatggatggggtaaatgccggaagcagcaactttgttatagtagggatgactaactatttggagaacattgataatgcaatgcgtagaccgggaagatttgacctcgagattgaagtgccagtacccaactctaaaaacagactacaaattctcaaaaacctccttaactcagttgaccacagtataaccaacgaacagctggaacaggttaatgatttttgtcaagcttttgtaggagcagaccttaaattattattaacaaattctatgcactgtaaaataaatagattaaataactccaatgaaactagttatggaatgaatatttctgatactgttgatactcctgagattgccgacaatacactgaataaatcactaacatatgaggatatgatgaatggattgaagattacacgtccatcagctatgcgtgaattgtatgtggaagttccggaggtgaggtgggatgatattggtggatacgaagatcttaagactgttattaagcagtgtgtagaatatccaagaaagttttcagcactttaccaaaagttacaaattcaagttcccaaaggcattttattgtatgggccaccaggtatatataatatgtagtatgtttaccgtgtgtaggttgttcgaagacgttgatggctaaagcgatttgtacagagagtcacatgaactttatctcagttaagggaccagagatgttcgataaatacgtaggtataaatacattacatatggtataacaggagcataatcactgagagttttatacagttaacttggttattaatgattataataggtgagagtgaaaggaggttgagaagattgtttagtaaggctcgtttgaatagtccatgcgttatattctttgacgagatcgattccatctgttgtgaagattccagttctgtgggcaaaagggtgttgagcactttgttgaatgaactcgatggagtgagtgctcttaaacaggttttggtggttggagccaccaacagacctcaagacctcaacagatctttgcttagacccggtcgttttgatcgcctcatctacgttccacttcctgattttgaggccagaaaagctatatttaaactaaatcttcgaaaagttaaacttgattttaatttggaagaagctgctgtaagtttggctaaactaactgaaggatattcgggagcagaagtcgtcaacatttgcaagcaagcttcgatatatttacttaatgacctgattaactcaagcccacagagtattacattaattataccactagatatatatttattttggaataatattcttaaataaaaatattaaataataatttaaaatataaccctaaataatgtccagaatgcttggaagaagttattccgttgtcgtatagttacttagagaaggccttggagaattcaaaaccaatgacatcacccgagttgatctcattttacgaagaatatcaaaattatacacacttttaaatccctaatttttttcattttttgaataacctacacattttacaatttacacattccactaattatataatatcactatatattactttagtatatattttaactgtacatttttgtcaaacatttttaaaaaactttgtttttaatggttaaatgcgcaatttttattaaaaccgttggattcgtcactactttatctaatttaccccttataagctcatatttataccatggaaggatcgttaaacctaacacattttttccaaatccattaaataacattgtagatgacggaaggctccgaaaacacatttttgaaaaaaattttgatcagatttctggagattccaaagatgacacacccacccctgatgataacaatgttctaatagataatacagccaatacaagtaataaaataataccagctgatgaggagatagttaagaggctggcagagcgtcacagggatgaaattagtagatatttgcacccattggagtctggattggccaaacaaatccctgattctgaacttgaaacatcttttgggaagccaatgactcctgaaaacttatctaaaagggacagggaatctatgaaacctcatccttacaatatgcctatcattccacctaccactaaaataccttattttgttaatcttgattattacccttcaaattctcctaccaataccactgccgatagaactgctacccttgatactaatagtatcactaatgatactactactgatagtgccaataattctaatactgtggatagcaccagtaccaatgtgcctaatactgttcccagttcaactattaccactgtcgagcaaactaaagttaacgatgttaaaatagagaagaatattttaagtacgggtttaccaattaatatggaatccaaggatcctttgagggagctgattgacaggaatgaagactaccctgatttgggagaggagtatgggcctaagtggtatttgaacgagaatgatgtgattggggatttgagtgaggtagagcttgaggacggttggtccattcttccatgcagaaaggtttacaagcacatcttacaacctagtgggctggttgggaaggatagagcaaggcctggtgatgagacctgcgtgactttcaagtttagtcttatggatgctcttaccaacaagaagattgttgacaatgaggacgtaggcgggcccatggtaacgacatacatgaatgaactggggccggtttttgtcaaatgcctaaaggctatggatactggcgaacaggctgaatttattttccacgtttccgagtataacccggacaacatgataatagaggagcttcaagatgtctcttggcttaggctctggataaacttatgggagtcacataaccctaacgaacgttggtggggacttggccctgatgacgctcatctttaccccgaaaaaccggaacacaatctacccaaaatgaaacaacttgaaatcgaaactgatgaaatcgcttcacaaattgaggtttcacatttataccattacgctattataccatttacatatatttaattaattcaagtatatatttgtatagactgagatgtgtactaatcctgcatcacctctttggaatgacattcttgacaagatgacttcaagccagaaggagtcatacgttaagcactttgacaggcaattggagaacattaataagatgaagcactctgaattcactggttcaagatcatttagagagaagatcaaaagcactggtcaatttaagggttatgacctaggttagtcattctcagtctaattatctttagggcatcaagttggaggaatttcaaagttcttcgcctggcgtgaaacccccttcatgatgtacatcgcaataccagttattccaggtttattactacatattacccaagttatcttaaatacaaatcaatctccctaacatgtattctgagttaattagtatacaggagtacgcgcagaacatgttaatttggatttgagctacgatcatctggtcctaaaaatagcaaataacaccgtaatttctattatttaccaataacactaatactactcaattctacaacaataaatgtattacatattttatcagattattgacgattatttgaatggcactgttgacttggagatgactggacactgggccatgagtgactctgtaagtctagtttcaattaattcatttaggcactgaactttgagcctttagaccaccatgacgagcgcatcaaaaccccaaccctagagttatcgaaaaatgatgagtacgacttagtctcggcaaaaccctcggtcctaatattcctcaaaaagacaggaacatcaactgccatctggggagctccattcgttaatatttaactcactaactcttatcgcacatatactctatattatagtgtgtaaaatatagtattaatagtaacaagattaatgtgtccataaattatgttttagtgttccctgcaataactgcttgtagtgttcgccggtttgttctaatatttccatggcttccttccttgagacaaaggtctttttgggaaggaactcgtttagaggttttcccctaggggttttgtaccacctgaaaaactcaaggattccggttgtggtacccgggtagaacttatcaacatcttccaactcgtttatatttgagtaatgctcgtcgtctggagaaactgcgaggattttccagtcaatctccttctggtctatgagagcaagggctccaacaggcttcattgccacgacatccccaaccttaagagtcttcctaccgacatcaaccacgtcaagcgggtcattgtcgcctacaagactcatcctccgctcttcaccgttatcatctttgtaacggtgctcgtagggaactggagcttcccaggtacaaggaatagcaccatagttccagtacatgggacagtccaagtcacgcaggcttccatctgcgaacaagtcctggactataggattatgttccagtccagtcccaatctccatcttggccctggtgttacgagggatctcaactaccatagtcacatgaccctcggaaggagaaaggggtaagtcatgccacggcgaaacattcttaccggaagagttaacaaactctaccctgaacgatttggttccaggctcaccgacatatcgagccttcacatcaagtaaatctataaactcatttcattatggtattatactatattaaatggttgttttagtggtatttattataataaatattcatatataaatactatggaatgaatggaagaatacgtttttgaggggctcttgaagattctgacattttaagcctctttatatacaatgtagagggtaaaacaaaggcactaggattagttttcgaaaaatagagggaattagaagagcttctaagtgaattataaaaattcaagctaacacaagaagaaaaaacactgttatttatgaaattataggaaaacaagaagggatataatttggaaaatttcattaaatagttatttgagatgacagactatccgatcagcgaccagaagaaataattacactcacatgtgcagatgagtaacaaacccgctatcaaccttcaatacaacacaaaacagatacatacctagttttcttcttcaatgtaaactaattcattaaactttaatttcattttattatattttattagattattgtcttcttgattgttttatttcttattttaattttaaattttgattgcttttaacgatttgaaatcgagtatttttcattttttgtaaaaactttttttaaattgacaaatatatcattctaacctttttgaatactttatcaatcaaatttttgtgaatttgactcatttgaagcatataacattttttgaaattaaaaatatgaattttgtggttaatttgacattattatttgaaattaataatatttttacagttcgatacaatttcttaacaaaattttgacctttaattaattttttggtttgtaccaagactttcagtatcagtatttgatatggtagattcgacacatgagtattgatatgcagataaatcgcactagttcgcgtaacacagttttgggtataaactcggtgattctggaagaggacccttcagattctctccagaccgacgaattaccgagggactcgagtggctcgtcaaaatatggcactgaggttgcgtttgagaaggggaagaagtacgaaggcaacattactggagtaaagtacgagaatgggatgccaaacgtccagtgtgtggcgataattgaggacgttgagaagatgttcgatatggacgactctcaaatcctgacccggagcttagagaacacaacttcgatcgaatcttcaaatgcaccttcgttcagcagcttcttcaactccgtcattcccatcaacggtggaaagaacaggtttgacttggctgactccaacatgtcctgtgatgggcccaatttctccaacattaacaacgtttcctctaccctcgaggcagtatcaaacacccttacggccaaaggcgacctcgataagccgctctttctgagtcttaacgagttaagcgcagacgcgtcccctcttaacaagtttgaaagggctccaaacaaagaaaataccctaagctccgcattgcttttggcagatacttccaccaagctgacccaagaattcagcaagaagaaggcgcctccctcgtacgaacgtgttaaagcacctcatctattcagactctgcccaatgccctcttgctatgtcataagcaaggacgactacttcaactggcgtagactttcaacactccagacctcctccgacacccgcacatcaaggctcaacagacacaacaccagttcacatctaaactacgacaccacatgtgtgtcaagttcagttgtaaacacaccgaactcaaatgtcgccagttctaagtatcaaattgaccaccaacttatgtacaattccagttttgtccccagttctaataataatatggcacagaataccaatgtgatgtataataacgtaaacgcaactagtgttgtttcaggagctacaggctatgcaaattctattaacagtccaaatattaactctggtaacaccgtcaacacgagtaatatggttaacagtagttttcaacttgacaaaagttttgagaagaatttgaaattaggatcaaaggaaaagaagatgacgactttgagaaatggctcaatgagtatgaggaatgactcagttagtatgagaaacgagtccatgagtgtgaagaacagagcaataaatagtatagggacaggaacccagctgttaagagggaacagtatggtatctgtggtgaacaagggttcctcaagcatgctaattctaaagatccagagttacattaagaactacatggatattaacccagattttggatggcgcagacttattgacgataagaacctgcccttcagcaacttttcaaacaattcttacatgttctacattgagtctaagaagagtacgcacatcattagcctgggtaacctcgcaataaacatcgcatgcagagcctttatcctggccgtaactcacgggtacctggacctcagccttgttccgaattatctactcagataccttcccagtcaaaccatcaaacgacccgattatttatcaaactcatcaggttctaacactagccttgacaaattggatgacaaacagaataaaccaaccgaaagtgggaaagttgataaaactaatgagaagagtaagctggataaaggcaatgaaaagggcaaattggatgataaaggagttgaaaagagtaaggtggatactatcagaaaattacctaagcactactattataagggtggtgtggattatactgacgaggagtgtggacgtgagacgatgtacctgaagagcaattttctggggatttatgcaatttcatcactagtccgaaacctacgaagtgagaagtacaagaatagataccagatgaataaaaaagacccggcacactcagtaaatgtgtttcctatttcctcctcacacagtacttctgataccggtaatagttttaacacccttaacgttggtaagaaaggcagtggtgtaacacctgataactgtcgtaatagtgcaaataatagtaacagtcttaataacagtacggatgaaaggttactgaatagcttcataccgaatacgtattataacagtaagaatagaggcagagggttttataagtatgttccaataccagagtatggttggaggcttgtatctaaggctcctcacgatgttagggaagacggccggcctgacgggttatcgaagttcttctcccgtttttttaaaaggaaaccgagtttcgaatcactttatcctaacactctcctctgcaaggttaaccctcccctaacctctgagattaacactaagataatggttgacgctggatctctgggaatgaacctcgctgaacagctctataggcttgaaatcagtacacaaaacagagaaaaatttccaaaaaacaccttcggattttctactcacaatgataaggtaacaatttacacatttcctaaaattttagttatatagactagatgaattgtattaatgaatttacaggttacttgcccagatgggactgtgtttgagtttgttccagaagaggttatcctgaacacagcatctcttatccacgagatttacatcactcaaacctatttgatactttaacctttcccgctcaagattaacattatactagcacgataaatttaataatggaggttaactcccttttaactcaccggaactatttttaatctgttaaatgtcataaaaatgcatataatttattatcacttattttaaacatgtacatggttttgacgttatttttcattaggaaggcaggcccaagcaacatcacctccataaattattcactatttttacaattcttttcaatattatcgcaaaatttaaacaaattttgttttttatcttaaattaattatttaaaatttacacatcgataattttattacttagtttgtttcgaccaattatttaccaatttcaatgactatcttatgagtttcatgtaaatttaatgtcagattctagtcaactcgtgttaattcacggtaagtgagtaatttttaattatttgaacatttagacctttttaagagtgttcggccggatgaaattcttgaagacttacagaagtttggagttaccgtgagcgcaagtgctttcaggaaccctaaaccagaagaatcgctaggtctctacagtctggcaatccaggtcgtttttgggaaaacgatccacgacattaagccggaagaactctcaggcaaactctatgataccaaaacagaagttccagggtaattcacaaatttattaaccaaatatcctttatttacctttattattattatgctatcatactatcactattgttatactaactattatactattatattacattaatgttataagtattttaatgaattatttatcatatgtaatattataattattgcataacttagggttgatttttctactgagaatgtggattatctgaaaaacgccattggaaatttgcgtctttggcgttattcacaaaagttacataaagttctgggactcggagaaatagaacgctatgagctttttaacccgacggcaaagagctttaatgagctgataagcgcatttgtagtatacttgcgattcagacaggcgctttacagcctttacgagtcatctattcagaagctagataatctggcagagcttgacttgaggttagatgaagacctcaagaacctggtgagagagaatgacaagttcaagaacatggtacttgagaatgtagttgagcacgagtcacttttaaaacttaaaaatgagcttgaaaataggatgatagttgccaatgaggagttcaccaatgcaaaggagacgaaaaagaaacttgaaattgaaaaggagaaaataaactcattggtaaatgacacaatgctttcaaagagtaaggctagatttacatttgatgacttgtctcagcacttttcaacaaatattgagactgcgagcaagattttcaatgaacttaacgctgaatacgcttcacaatcgcaaacccttgaagccttagtttcagacgttgaacgtctaaacacgattcacgcctctttagttgagagttgcgagacttttgaacttctaaaatctaatttagaggaacactacaatgaggtaattattcctcacgttaaaagcttggagctttctaagcggctttcatctcaaactgagtctctaaagctaaaaattaagcagttgacccgtaccagggactctattttgaaggatattgagcatcagaagactttacaggcagatagacttaaaaggctctccgatgagcttcaagccaaggttgacgaagcacacagatttgctcaggaatcttcgaatagtgagtctggactcagggcgaagatatccgatatgcgagatcttatttcccaaatgaactccagggctcaagatgtcaggaaacactctcaagagctgttttctcagctttctaacatgataaacacgctctacgactccattgagtcctataatcacaaaataaataatctcaataactctttaacaaaattttaaaaatgtttgacaaatgtttaagaaattcctaatttttataaattatacatacataatacatcaggtacatgaattagtagatcatattagtgtaaagcctgaaatctaataaggctagcatagttaacacaattttttaactaaacgagattggcaaattgggattagaagaagaatccgagtattttccctccagtgtgttttctacgtgcttcttcgtggtccatgatcccataggcagtagttaacacaagatgtccaaattgtctactgggcaatatgttagaagaccactgttctagatcatctagagagaggtcgtatcgaggtgaaacaactccgcacttgttgatgcgtcccaagagctcaactacgattttcccactgcgatgatcatcgacaacgtcaaagttaccgatatatccgtgcttctgcatgacctgcagaaactttacgacaactttggacgagggcctgacaaggacttgtcgtcttcctcgtttttccgcgttgacaatcgactttaaacagtcggcaagaacgctcattcgaaccatttttaaatcttacttgactacagaataactaatttgacaattttataattagtttgtataatccacacaaatacaagattagaaatttgaatttattaatctagagtataaaaactggaaaagtgtaaaatcataaaatatacaaaagattccagtgtataataaagatacaaaagggtttataacgactattttctcctacgaggtggggaagcatattggtcagatgaactgtgggggtcatttttagtttaagaatgtttcatcccttatttttttacacattcctcaaacagattgattatcatcctgaatagtaaatttcagccccaaactcaaaaatttacaccgttttacacccatttattcattatctacatatcatatacaccaatggaatcctatggctaatttacttaattccacccattttcagcgtatttcttatttcttctttcaatcgctaattgcatggcctctacgctcggaaatatcctcacaactgctctggaaggtcccggtattgccatttcttcatttctgtcagggctaaatctaacagttctgattcttcctttgatttcagtgttctcttcaataaataattccttctcttcacacgtgacatttccatcctcatcctttttgtttatttttcctagttcttcaacctccacacattcattggaattctcttttggactgttttcctctagtaaaccttcctcttccttcttcttctcttcatatgattttaggtacggaatgctctctaatgactcggtcctcccaattacacatcttatgaatcttcttagcatcgaatccttcctttttggtttctccgaatcggaattcttatcatcagcatgagattcttcatttgcagttgttctccctctaacttcagtcctgatttcatcccccgtatcatcacttgaatcatcggctacgctgcttggcatagtttccctcattgtttgatacgttggtattttctctaatcccatgttttcaatgtcttgagagagttgaggaatacacattttaactctgtttctgaagattttcccgttaaagccaccgattcctccccttacgggctccctccctgccacggcgctttcaactctgtacgtttctctcagaggctgagaaactgttttcattaaagcaatacacactaaaaacagtgtaaaatacaatgttagtgatatcatgtgtgagctcctcatggtcaaaatgtctctaagattcttactaattcttaaatgcttagtatagtcgtgttttccggataatttggcttttataatttataattttatttaattagtttattttagataaaaattgtaatactaatatccatgcaaatttaacatagctagctaacttgaattagggttatcttgattatgcttaaaaatcaggaggaagacgtacaaaacagttaatacataaataaataagttaattttataaaaatttggaagaatttgaggaaaatacagaaattttgcagaaatacactagtataggaaatttgatttactgggtaaaactggaccaattttagctaaaacgaagggaaatttcccaaaataaatataactatttacttgtaaattcatttattttttttaagactataatttggagatggagacatagggagcattgttgtgtaatttatttttattttttggacaagttcactttattatcattttacctttacacatttagttatatttttgaaaaattaaaattataatccataaatcgtattatgtacaatatttttctacaatacacctaacgtcagtcatatattagtcacaactctcactattttgtcttaatttctttcatttcataaaaatgaatagtccaaagatcggtgaaaaaattacggatgagaaacactcatttgtcaggagactttccagtagcatatgtacgaaatctgctgagatcacgaggatttttgacctttttgaatcctacgctacaaatctcagtttagtgaaaactgcctcagaaaaacttaagattcccccagggattgttctcttgggcatggtttcaatgcttttagtgttcttgatcagtaagctcggaggctcactaatttgtgacgccgttgggtttttatacccctcctacaaatcctataaggttctaaagagttgtgatcaaaggggagcaccttctggatccaactcagccaaacagtatgagacggcaagatcggtaaacgaatctgaagataaggaagctgaaggaactgattcggttaaaaaacagactccaacttctgttgttagtgaggaaaccaagaaaaacctcatatactggaataaatactgggtagttttctcgcttggatttattttcaactactttgcgaacattttcctttactggcttcccttttactacgttctgaagcttgtttttatagttgttttacttcacccgaagctacaagtttgttttattcatttgcgtccatgtacctagttacttagaacttaattcaatggtttaaatttgtttagggtgctgagttgatttacaatttcttgatagcgccactcctggataggtatgaatcaaccattgacaatggccttgtatcacttgagaaaactgcagaccaggtctttataaagtacggggtttccaaactttccgacaaactcaatgagtacgccgaaaagcacaccaccagataataagcacctttaaaaattaacaagctaaagtttgcgtaattttaaatttcactatatctgatatttaatccatttaagaaatagggcccaaataatattttaaaatgtaataaggtaggggtgatcaagcgccaattgggtttagtaaagaaagtaagagggataacaaattaccaaggtgtttttttaaaatttctcctttgccctcttggcctagagaatctgttatttctcaggccaaagcgttcccttgatgcgaatggacggcgtcccctattgaaaacttccccgtacatctcaacagctttcccctcaattacagtcccgttaaattttgatatggcctttttggcatcgtctgtaaacttgtagatacagcctccagtaccctaaactttcattcaacaccttaaatttgtgtatatatttaataaattccattatggacttaatatctggtatttaaataatcttattgtcattgatatctgggattcgaaccttggacctgtcggtgttatcataatcgacccaaactttgacaacatcaccaacggagctgaacaactcctaaaaatagcttagtttacgtttttagaaattatgacttattaagtctagttgatttgttaaattaccataagatcttccttcataacactgtggtcgaggttggacactctaacaatgtatttggtttctcttcttcgtcttctgaacggctcgtttctgtcactaaacctcctgctaccgcggaaaaatgaccttctagaccttggctgggaggccctgtttcggcgtgaaaatcccttgaagttcttttcatttttcaccttacgacttttcataacctttccaaggtcgtctatataatttttaaacttatatttcagttgttttaaattcacctagtgacatgtcaagcttgttagctgtcgttacagaggggtcaacatccattctttcttctcacaattatagaatttagtttgggaatttaattcaacagattttggttaatttattataaagaaatgaatgtaaaattaactagaatataatttggagttgttgtggaagatgactgtcaagttaaaattttttgaacaaaaagatacatttaaacaaaaagttaacttgaaaaaattatacttagagtgaaagtttattttttgataccaccttgtcgctgtagcccccttttggcattcttctatacattatgtttgatttggcatcagtttatttatttttgtgaatgacatgtagaaaattaaatttataaaattttaatccctgtatcatattctcatttgactaattttaggtttaattcattttccattttgtattatagaatcctttaaattttaaacctcctgtacattacacttttgaataaaaaccgttttaaacatgaaagcaatttattatgaaagaaactggcgtttgtgaggtttgcggaaccaggtttgggtttatttactggagaaggttctgcgccaaatgcaaacggacttgttgcaaggactgcctcaattcggtggtaaaaggcagtgtatctgattcgcctgattttgataggcttaaattatgctcagattgtattgttgccgagtctactacccagtcgatttcaatccacgaggaccttgagatgacagggcaaatcaactcttccttgaaacttgaattgaaacagaaaataatggctttggagaagtttaggtgctttttgcttcaaatcgcatcaactttcggacctaattcagatttactccccaattctgatttatgtaacaccagtacactgcataccacagattcacctactagttcagatttacacacaattagcgacagaatacaacattctgatttaaatacaccttttgatactataaacaacacagatttgagttcgaacaattatttttcaattaactcaggtcgacatacaacaagtgacacctttgtcagttgcgataggcttagtaccattcctagtatagaaaacgggttagataatgattactatgacattggcgagctcgtaaataaatgccaggacgaatttgaaggcatgcgagagaagatcagagccatgaggaggagatatgagagttcaataataaatgaggagataatgaagattgaaatggaccgcgtaagcaaggaacttgagctggtttcaagcgagcgtgattctctccgttcttccgtttctcggttgaaggttctcacctgtgatatggaagacttgaaacaacaatatgaagacgttttgaacgagcgtgaaatgcttttggccaggtgtaaaaagcttgaacttctccttcacacccctaacatcaccctcagtaacatttcaagaagccttgaaagtcccattgttagacgtgacgttaacaggaatcgattctggttatcctcccctttctgtcctcgcttctactctaacccttaattttttaataaatatttttacacatatttatatatctgtaaactagagtattagattaatattggtcttttattaacggcgttttctatagcatccagttgttgtcttctgacattcaattcgttttgcatattagtgttttctctcttgagctcgttgtattgggttacttgatcttgtaattctcgagttagtctgttaactctttctctcaggtcctcgagtttcttgtttgatagttctagtgactcatctctttttctcatttctgcctgcattctcttcaactctccttccgttctgttctttgacgcatccaaacttgagatctccatctgcttatcctacaacatattgtacacagtgatataacagaatggtatatatataagtaaccaaaatcatctatatttatataaaacatttgttaaaaacaattaaataattataaataataataattgttagtattgtgtataaatagtgtataaaatacctttacttctttttctaatctcccaactttagacctgagatgtgatacttgctggttgagattcttgtttgcatcgttaaaggagtccaaagttgacatgttggatttgtatttgtcagtgaggtaaatcaacatcttgtaaagtgaatccagctgagtgttagccttcgagttttcttccttaatgcgatcgtattcgacctggagctgtttgaactggactgaagtagcctcaagatctcgaatctgacttgccaaacggtcaaattccttcatttgacttgatattttacccttcaagttcattatttcagactttagagcatctctctcggctagtattctgccattctcatgtctaaggcttgtaatttctgcattagctgctgtcaacgagtcctgaacctggtttaagttcaaggttgttttatttagagtttctttcatattctgcaaatccgacttgtagcgttctgagctttttgtaagttcttccttcatacttgatatactacgctcatattcagttctgttaactcgcatatcagttttaagttggtcgttttccaacctgagccgctggttctctgttttgtactcattaacaaatttagtcatttggttatacttgtccttgctgaccagtgattttgggagattattgttcaaaattccgttaaccacattcttcttataagtgtcacatccgtttaagtactgggtgataaatgtatctaacatcaccatcatgtagttggacaagtctctgttttgtaactttacagtcagcgtcagcgtcattgaatatgaaaagctgcttgcattcgataaatactggttaaagagtgaagaaaaggctggatacgacttatacattgtcatcattccacacatcacgagtgtatctggcgtcgaattatgtgctctaagcgcttcgtaagataataccttggctggaaatgggcctgaaaataacattgaatataaactatcgatggtagggttagtgcccaaatataaactcctaacgtaactcaaaactctttgaacatcaccgtccatcttattttccttctcaactccatcgtacttttccatttctacccgaccatagttcttgtacacatcctttctatcatatccatcaactactttggtcaacttcccattatccattctgtcaaatccatttgcgactggacggttcttttgatattcaaagagttttggccctgtttttgacaccaaagttgaaatgagttccttccagcaatgatttacaaacgccgacatcaatgtcagtcgcgtcagatcctggacaaacttatcctgggtccacggctccatttttagcttattatccttataatagctatcataatctgtattgttgtattgtgtattgtactcgtagtcggtatcatttccggcgtatgggttatgcggggtgaggtttaacaggtccagcatagtgttggagtacttgagcttgttaattctgggcaaggttgtggtgacgtcacagctcatcagcagtttcgaggccaacactgctgcattcatttgcaggcgagactttccaaacattgcaatgttgaatagagcctccatcgatttctgaattcgattaccgagcttcatttcctggtttaacatatccttactcttttcctggtcatctctataattattcttataattatagttatactggttcagttgagggttgagagcgctgtaggtgttattattttcgggggaatttgtgaattgagagatgtagttggcgaatgcggcaacgagctttgggtatgaatcgagaactgaatttgttagaaggagtatctcattcgctaaatcttcattgagggcgtcgacatgcttccagaagttgaaaaggaaaagttgcacaaatgtagagacattaatgttcgattcgacaaatcttgagaacttgtggtctctgaaacagttgtcaaggcataaaaccaggtgcacaagatgagtcatgtcactgatttctcccacttcgttgaacaaggacctcggtaccttgaatgcattggctgaaatctcctgagggtccaaatatgctatcaatatgttggtccaaagaatgaggtttttattcctggcgggaattgtcctcagtgctttgcggaggcaaataactgattccagcaaatcggatttattttggggtgttactttaagctttaagagaaaacagactacgctcaaatgtctcacaaacatgtcagtgttactagacactggtgggatcatatcattctttccgcttgtccttggtttatcaaacagaatgctatccctaccatgttgtgggttgttgcctgacacgtccttttgctgagcgcttttgcttgttgccgactcgacaaaagagcaaattatgaagactaagaccgagaagaaatcatcgtatggtaattggggttcagagaaccagagcaatttttctaaagtgcatagcagtagcatgtagagtagaactgctctgcccatggtattatacttggttagaaatgtgtaaaaaagtcgtgatttttcaacttgattcaatttagagcccgttgctgccctgtaaataagccgcattacattcagaagatatgtcctcaaaccttccaaattaaggttatgatgatttcccaaaaccgccagtatcgagaggcttttcatgtggtcttttgtaaacagtgacatctcgtttaatgcttcaaaagttacttctgatctgccgtactggctaaaatattgtcccgtgtcctttggtttggtgaaatcagttaccattgattgagtaactagtgtttggactcttggggcataattattcattaaattcttgtaatgggcgtttagaagtgcaaaacactctggcgtattaagatatctgcttttgtacacattcctttcaaacttcgagaactctggtgtcatgagcgattctgctgagaattctctcacaaaagtgacggggtcatcaaaaaagtctgcccctccgccttttacatctgttgcaactggagtaacgttagcattgagtcggttgttgttgtgattaacaccgagatgattgtagttcatgtgaataggcttaggatttaaggtcatgtttctttggggttcaaaataacttgcggcggccggtgagggcctaccttctcccattgtaaaaagaccatcacctaccattggagactaaaaaatttagtgctctaccatgaatatccataaaaatttcaaaattcctatagtacatacaatttgtcggacgattatcactgttggaccaatatgaattaacaattaatactaaaattggacaattgatgttattatttaataatcaatagattaccagtggtaaaccttttaaatatttttaaacaacggtggaatgggcaaacaatatccaaaataggaaatttttttcaagataaaaaattaaatgtctataaatatcaacagtagtttgattaaatcaaggagatcaaatttaacgtttgcggcaatttataaccagaattttaaaacaaaccaatccaaattgatgcctttttagaatattgaaacaccatctaattcttacacacctaaactccacttgaaaacagcacaatcttatgccaaaaacccgaattacagtacgatatgaaatgtataaaaattaaaaaatgattataattacaaaaacaaattactgtagaaccaaaagggtcattttgcttaaaacccacagcaaaaattcctcttataagatgtcgtacaggtaaactttgtaaccaaacaaaggcacccaattatttgttatatgaaatacaatagcgattggcaccaaaatagttaataagtggttcttacgacaatacttaactttgataatgtggagtttgatcatccatcgttatggggaattctccaggatatatgttttatttttggcttttacgtccatacatttaacaaaaaatttagaattcgatattaatcttttctaaactttataatttaacaactaaggtattttccactattccatttcttaattctttcctttttttttacactataaagaatagaattattttgttgaaatcaccactttactctcactattattcaaaaatacatttttaaatattaaattattgataagatcttgatatgagtctaaggtgttaaaatcttccccttcatattaccaccactaatttaatataccatgtgacaccttatcattccattgaaattaacaaaaactccactcgttaactttaaattttaattatctttcttcatacttttagtgggcacttaaaaacaactcgaaactattatttcacttttctaaacacttttctagttttttatccttaaatagtcattttatttttttatattttgaggtaatattagaaataatttattttttaaaattttcttatttttataaaattcttcccccgaagtttattttttttaacaatttaattttaatttcctctattttttaaaggtccttacacatttcaaatattttaattttttcacttagcaattaattttttaaatttgtttttaccaaaaatttcattttctatagtgatgtttttgagtatttattcactctattacacccacatagtttgtaattaatttattctctggattccattataacttaatttttttacattatattaatttcgttttgttattgtttgttattaatatttattttagtctttgtttttccattaaaataccattatatacacaattactgtattaacacctttgtacatatgaatttttattcaaatgatcaagaataagataaaacaataaatgcaaagttttatatactttaaaatagtttttttaatgctaactatatttacggaatcctattatattaccaggagtccattttcacttccttataatttatatgttggtaaaactacaaaatttgaacattttataatcagcgggaagagaaatggcagggagttaattataggaggagatttggaggaagttccctcaattgtaaaagaagtccaaactgaggaatccaaggagtttgtcgataaatgctgggataaaggtttgaatattaaagaatcattatcacttttaaacgatacttgcggtaatgacaacgactcaatcgtaaataacttctttaatgaaacttcttctaagtcttctgacacagttggtatagtaagtaaagttgaatctgttccttacgaagatttcttcagtgatgatgaagaagaggaaccgatggaggttgattatggtttattgtcttattctgaaatattagtaatactcagaataataaatgagaagattaacaattcacaaaacgacatcaaagcagaattgattaaaaaattaaaagataatctaaatctgactgattcacaagcagataaacgccttgaaagcctctacaagatgggagattttttcattaatctaaacaacactgttgaaagagatcctttggacttgaactggatccctaaatttgaatgtaaaatatatagatttctaaaggagaaggggtacacactttcaagagccacttggactgatgggtctgtacttctattactaaaagaaaaggtatctcctgtgaaccattatttcgttattactaaaactttatatataaatgtgtatgtaaatttccgaaaaatatatataggacattcctgagagccaaatctcaaatcttcacgattcagtatatttatttatgcaaaagatggaaaggacggaggagtttagaggaattggtaacattggtttgatggtatcaggaagcgattaattgaatctttaaattttaaattatgttagttttaaaataaattcccatcgcacaatattataattttataatttattaatttcattctcttttacaccctatattgtgtaagattccatgccctcaaaatattataataatttaagtactttgataaaatatatcacataatggttagaatccataaactatggaataatgcagttcaatcccagttgtaagttctattttacaactaattcacacaattacacattctcatgtatttttagccaatgttaccctttttctgtcagttcgtaaaggtttagagagttgtattttaaatgaaataaaacataataaattcttgaataatttctacaaaattcacaaaaataaatttcaaaattctcaggattctaatacacatcttactacaaattcagattattacgattacactataactgaagacattaccagttataacacagtaactggactagctagtttaacaaattcgcttcaacttcctgaagaatttgaagatacaaataataagtggttgagaatcggtcatcagaataattctacaggtaatttagaggaaaaaactcccaaatcaaagactacagtcagtgttaaaagtaataacttgagggattaccttgatataaacgaacaaaagggaggcctagagattaagtgcaactttgagtggcttatcaagagttccctctttttaaaatctgcagaaagcatatggctaagaattggaaacccattcagatgccatactcaagaccaactcactacattcgtttcaaaattaccttggatttcttacttttcatcctctgattcaattgacaaggttccattgcgcataatatcccgtaactcaaagctctggtcaagtcacatagtacgagattgtgtaacaagaggaattaaacaaagattaaactcagacttaaaatctgaaaataataataccacaacacaagataaaggtgataacttgaataaaacttatagtgaggacagttgtatatcagtaacaataaacaggaatacttgttacgcagcaattcaattttcagggaggctctcaccacgattttataactatttggagaaatttaataacaacacagaggacacccgtactggtagtgacaaggttattgtttgtgatacaagtaaagactattatagtcaaataccgctatggtcactttctggaattaagaaagcaatatcaaaatcgtttaactcatctcactattcaacaaacttatcagaaaccaatttggagtcatacgactctaaaagaacaaattacataaagtttcaaaagttgttaacaaacgactttttggatacttcagactctttaatagccgcgtttttacacaacaaacatttgcttaaagctatagattcagattccactgaaactgtaagtaaactaaaatttaactcagttcattattttattttagatttgggacccgttctgtggaactggattagtgatttgcgaacttgtatccctcgtattatcactaccaaattacacacttgataataccaataccataacctcactagcaaaaacgtttttcacacaaaattcaacccaaataaagtctttgtttgatcagtatactagcaacttgggtcagaaaacaaagaatttcaagattgtaggatctgacacaagtttagttaatttatcagaagctaattctaaaattttaaaattcatttcatactacaacgatatactagattcaagtttgtttcaaaactctaaatcattgtaggtaaatttgaagccaacgattcgattttctctaaaaattctacactctatcaatcgtacaggttcagatttaaattactccaccaactcgtttatatattaatttaacacatataaaacctataaacaacggtttaattgttaattacagcaaattgcctgttacgattcacaactgttccccagagaaattatctcattacatgaccaacgctaccattgtgacaaagtttccgtacattgattcaaaagtaagatacaactagataaatattagagaaatcgtataagaaaagtgaaaattaaaaaaacttaactatatctatgagtttaggataaaggaaagtttgaaacaataaagctctgcaaattatttggccaagtaatctcgtccaaatctgactggaaaggcgtttttgtaatttccagggtaatttacctaagtttaatagttaaacttagggtaattttttcgagtaccacagtggccttgagtggaagacgttagttaaatcaacaaactcaaattctgaaataaaattacttgagttagttattctcaaaatttctattataatataattagttttatcaaattttgttataaatatcaatacactttatttacgtatatcataggtggactggaagaaccagaaactttaaatcagttcaggataaactcgatcagctcaatgaaattgacttcgtatagtatacttttattactattttcattaccaaattcctactctttctgtaagttttatattcttatgtttaaatagtttcactgaattttacatcagttttattacgtagttacccactgttcatacaatgtatatttgtttgtaattttgttgcagttttcaagagtagaaatgctcccttaaaagtgtaagttgcttatggtaatgattgtaatcatggtttagattttctggtcccattaaggtggcaattatgggctcaactggttcagttgggacacaagcactggacgttattaggaacataaataaattggaaagcaattcaggaccaaaatttgaggttgtagcactaacggcaaatagtaactataaactactgtctcagcaggttaacgagttcaggtattttaaaaatttagtacccaatgttaatcaggcctgaagtttgccacattttaaaaaactacgaaaaaatgcctgaattattgaaaaccaagtgtaaaatattaaacgaaaagtctgacttgatggatttatgtagaaattttgattatgacataatactgatggcaatttcaggctgtgatgggatagaacccacactggccgcagcaaaaagtggtaaaaaaatcgcactttcaaataaagaatcggtggtttctgctggaagccttttaagtaaagtagttaagaagtcaaaaacaacagtgctaccggtggactcggagcataatgcaatttttcagtgtctggatgatggcacagttgataccagaaaatcaacttacgtgtgtagcatatcatcgcaggccctagctaaggttaagaatttaattttaacgagtagtggaggtccatttaacggcaaaaaatatacggagtacaaaaacctaaggagtacagataatataaatcacccggtttggcaaatgggctctaagatcactgttgattcttcaacaatgatgaacaaagcactagaggttttagaagcgcaccatctctttggactacctctagatagtattaaaatcctagttcacaaggagtgcgttgttcattctctagttgagttcatcgacaattcagtgctgtgtcaaatgtatttgcctgacatgaaacttcctatatctcatgcattgcattggcctaacaggaccaaaaatgctcttccatcacttgatttaaggggccgaaatctcagtttcaaggaggccgactatgaaaatttcccatttttaggtctcggttacgaagttggcaggatgggtggtctttaccctgcagttttcaatgctgccaacgacgttgcaaacggtttatttaggtctaataaaatagattacgaaaaactttaccagattgttcgtgaaactgtagagtcgttcaataaacctgacctcagtgatgacattttacaggttcctcatacatacatatataaatacttattcatgttgtactacagatcgttaatactacaatccacttataatataaattatttatactatagtgcttttataaaaattagttttaattctggattaggacatattgtacgccgattcatgggcaaaagatactgcaaacagaatgtattccaaggtggcaatttgacattttaataaaccaccactgtttttcactttgttaacaaattataatattataattcaacatatactatgttaatgatgttaatgagtagctttaaaattctctttcgactccagtgccagtgctatttgctcaagattttccttatcctccagaattgtttcacctttgggttttataacttcacccgagctctggcatttgtaattgtaaggcactcgttttagaaatgaaaggtcatttgggcaggaatccaaattattaataaatcttgaaagtgggcctaatttcttagtatttgggaccttgtacattgaaattccatcatttttatagtgcaaatcatttaaatcccgatttctcaaattagagtctaggtcaactataaacctccctgttgaatttatctttattccctctacattcttatcattcattacatcatatcgaaccaagttagtctcagtacctagtggtttagagtattccattctaaactggatatctcttgtggtcagatcctctattttatctattttattctggatattgggagaataagaaccatcaaatgaacaaggtggatcagatttgatatcaatttcagccttgttaatcttttcgagcttagaattttcatctgggatcgagttgtcttccaagtcctgtacccacatgtattcctcatcaactcttttccctttaccgtatagtttattgtacaaattcctctgaaatgatgtcatgtatgtagttctttttggtgttatgttatagcccttgggtaaattgaaaagctaacattaaaattaaaaaattaaaaaactaaccttttccttcaataattcaagtttcatcatctcttgatcccttttcactctgcgcaactcccttaaacaagcatcatcatcacctctaggtatctagagaaattattaatcgttacgtagtaattagctggattgtgtatgataaatatataaaaattgactaacatcagtttcaatattgtaatccttaaaatagttctttaaacagtttagaattgatgttactgaaaaaagctctctaaatgcgaactctggcactaccaaatcattgccgtttaagtgaattttacatatggagtacatccctatcattaaagcccccaaatcagaaaggtcaggcacacccctttcaacctatagaatccataatatattatatacaaatagcgtagtatatatattcaattcataatttgtgtttcaaatatgggttacttgtacctgttggtatcttctgcatcttcctttttttacacatcctctgcaaacctgaagttcaggaatgccgaaaaaattccttaattttttggaagatttcataatattggcaggcatagactcaatcggaggaagaatcctaaaattaaaaatttagggaattaattttcaaaatacatctttttagtaggacaaataaccgggcattccatggaagataggtttaacaagttcttcttgtcatttattgataaagtttgaacaaatttggttaaggactttgatctagtggcattgaggattgattttttcaaatcgaccctgttgaaggatttggatgaatccagtccgcaacattctttagcgaaactgaccaaattgtccataaatttaaggcattcttcattataaactgagcctgaagtgagaagtggagttttaacatttttcataacaataaaatacaaaataagaaatataaaaataacacgtgttgtgtagaaaattccatgttctgcacaatttacacagttttactttaattaaattaaatttaaaaaataaatttgtcatttatgtttagtattaatttatgtaattattctttgttgtatattattgtacattattctccataattttgttgattcgtgttagaaaaacagcatgaattcacatataaattgtattatagccttttaacatgttgattattaatgccaataaaaataggcgtggaaataaagccaattagaggcataactcgtttcagcgttagcaccctttcagttgctaataagtacttatggtttggcttaaatgatggaaatataatgaaattttctcatgaagatgaatataacaatacagaatcgcctagaatcggtggaatcatacctgaatatacgctactgagaacgaaaagtccaggtatttgttcacctaatcaacaatattcaatatgtgtaggatcggaggttcgtaatttatacgtagactcaaagtcatttcactgtctggtatgtttaacatctggagaccactactactctaattttcaaagcacggagttgtattttatgaggcctttacaaagagtgttcataagatctctggcattcactgaactgacttctgagaatcacactgattctttcttgataggaacacagcaaggctcattaatagagggcagaattgattactcaaagcctcagtactattttaaatccctacatgtcatccctggttctgaacctattctaagtacccagttgattcctatactatataagaacagccgcacatttctcgttgtagccgtaacaacaaaaaggctttatgaattttttggtggattaactatccaggataccttttcaatatattcaccgaacacttctaattctacaggtaatgctataaaccctattatatatatatataatggtataataaaatttttaggtgaaagtaatactgctatcaataataagaatgggaatacgggattaagatatgaagtgcctttagcagcaccttatggagaattactggtagttgaaaaagatgacggtagccacacattgttttggacaaacgcaactgggattgtgttttcaagtgttccaagaaaggtgaacgagaaccaaacatcctgtttggagttccctcccaacatcataagttatccaacagggttcagatatttgacgttttcaagtagcaccaaaaacttcaagcaccatgataataagaagaatttcctacacaaaccgccggaacaaattccaaaaagtgctatagctctgaataaccacctacttctcctctttgacgagatcattattgttattaacaccataattaaacagcaggtatgaaacatacaataacctattaatttgtataagtataaatatctatgttacaggtggcttcgttttcactcccatacggtacctacggtgagatgaagaagttggtcaaggatcaattatcaggtttggtttgcctgttatcatcagatgccctatacgaaattgtaattcagaaggaatctgacgactcctggcattaccatatgctcaaaggtattttagggttactcattttccctattttatacacacctgaggaaatattttaggtgatatgaagagtgcactggaacattgtaagacatcagctcagagagatcaggtttcatttaaggcagctttagattactttgaaaaggggatgtttgaagaatctgcaaggatgtatgctgagttagaaaatcaatattctgaaatagagaatgtatttttaaaatttaatagaccagaacacgaatatgggttgattgaatatataaccaggctacttcagaaaatggacattaacaaggcatttccaaagtttataatattaaccatctggttggtggagcttatatcattcaaatttaaggacctgtcactcacaattgaagcgggaattgagcaaggaaaggatgtagagggtttgaagactctctacaactcattgaaacagaaattttcaaggctaataatttcagtaaaggatatagatgagcttgtggcacccataaacttcatacttcagactacaggatgtattgaagagtgcatagaatacgcaaaactaaggaatgatacttccactgttatctgtcaccacataacaaatgggaataacacaaaagctttgactgagctgtcacaaatgcctccatctgagaaaagagactcccttttccttagatttgcacctttaatattcatggatagttgtgaatcctttgcaaaggtccagttccaatcactacctcataactatttaatcccaatactaacactgccaacagttttgccaaatcccaactatttagatagttcactgaggattttaaggagaatactctcacagccaaatgagatggatacattttcaaagtcgttgctctggtcgatttacattgttcttctcacatttctcccaactgaggataacctattacaggtcttatcccaagccaacgttgatttcacaaaattagacctctcaatcccacttagatatttgaagcttaaatcatataattccactcctctagattctaataatgcagttaaactaaatgacgtaaatcacactaatcatgtgaatgatctaaatcacacccgttggatggtgccgttcatccacctcttgagtttgtgtggcatggtggacgacgcacttgacttgtcacttaagataaatgatcttattctagctcagaaatgcgcaatgaagcctcaaaacgatttcgataagaggaaactctggcttaaaatcctaaaacactcctcagtaaataaaccgaaaaatatcaccagtttgctcaacgactctaaaggctttatacagattaacgtattacatatatttataggtttttgttatgatagttggggctgtattattgtttaggacctactggattatctacataaagatatcagtttatgtgatttgaagggagtaattgatgagtttctactacagtatgaggataacatccaggaaagaagacaggaaattgaaaatctatgcaactatattgaggaaactaaatcagatattcaactagcctcaaaaaggtattatttatttaactaatttatccttattaaacacatttatatattcatgcacaatgtggtgttgatagatttgtgaatgtgtcaataagtgaggagtgtagtgtgtgtagtcagtcttcatttctgaaaaacttcattgttttcccgtgtgggcacgtgtttcaccgcggatgcatagcaaaaattctatatactttgctaaaagggaaagaactttcagagtttgagagtattaagggcaggttcgacgaatttggcgatggcaaatctgagtccgattacgtcgattacctttcaagggcgtgtttactttgtggttatcctatcctcctcttggcatcacaaccgtttataactaactctgatatagaagagttggaaaaatggaccatacaataatgtactatatattctttacatatatgcatgtatactaccatgtatatacgtttgtgtggtgtatgttgtatatcatagaaatagttagaaaattgatgggtttctatacttgagaaatttatcagaaaacacatctttagggtcctttatcacatctccgtctccagattgtatttcagttagtgggaaattctcttctgatggtataatgtacaggaatggagggtctagcttaaacttgcgattcataagcagcggttcatgacagcaggttattccaaagtcgcatttatcagatttgtactaaaatataataataattatagtaattataagttggtattaatatttagtaaaattttactttgggttttaggactatctccgtgtatcggtcctgaacatcctctattgttctctgcatgtcccaagaaatataaatccaagggtcaccaaaatcaacgttataatactctgcaagcctaagaagttctttatcagcttcttcatcccaaggctttccctcgttagcgagagggggtgcttggaacgccttaacataatccatgggattatcattgggccacaagccatgattatataatctacaatcaattttacacaataaattcataatttatttatgtacactgtattataagaaaggttattgtgcatacgtgatgtatttaaagattttgcgtctttgtttattggtcatggtagtgttcgtgtacagttcctacaattgttaataaacataaacatttcaggaatacctcaagtgttgatgatataaactcgttccatgagtcaaaagactccgcaatagattcaactccgtctccaatatcaaaagcctttagaaaatcaacaatatcccaaccatctacacactagaattaatggtttagtctaacctggaggtggttttgagtgtgctttacttattattctcttctcattctcgatatctaaagtcttttgttgttttaagaattttctaaacgttttcatatcaaggtatttcctaggtctccttattggaggtcctataaacatcaaataaaaattcaaaaaactacccaaatcctcagaagattgatttgaggaagaagaatcatcataacatgtggaagaagttttaattgtcctcgaaaatatgtttaaactgcgatatgggcatttgagaaccttaaaattatttctaacaagtggaagtatcagagcaagtgtcatctaaaaattaaaaaatacaatttagatttattaacacatgaatattgagtttataaaggatttaaactgataaaaacataatgttatcaataaattgttctttccacacacatcagtttgattatttctttttgttttttgttttttatattatccatttaaattcattaaactataataaaaatttgtaaaatatactgtaatatcttaattagtgtaattttccacgatatcatgtggtatggacaaggaatcttcacagaattccccaatcacaaagtttaaatcaattcctcatgtaaacattacagatttgctgccttatgaccagctggtttttgtaaaatctaataaggcccctcaaaccaagagaaagaagcggagtttaacccccaaacctctgctaagtactcaaaatgatatcacaatacctactagaataacattagatgaaactttgagggataaatttccccaagtttcagtaaatccacacttatttcgtcagaaatttgcacggatgttatcgcacatggaggagttggacagttacgcctcaactctggagatgggaaatactaagaacacaaagaatgactgttctgatcgagaaaatcttggccgttctaagattaacaagcttagagtttcagcgtcacttaacagagtgttgcacaggaaccttaggatacccacgatcactgagattataacagctgctacgaacttgaatatgaaggaatatgaggattcctcaggcaaatatacagttaatgtggattttgaggataatccttggtctgaattaaacctctttaattactttagagacagtattaacttgcacacttataagttagtttcaagctcaattaggtatactagcccttcaatttcaaaaattgttcactctcaccttctaattgggggaccgaagtgtgatttgtcccccttgatgtttcataaaaaggtcactgaggcttattttaacaaggaaagcactgacactaacgttgaaattgtggatgaaaatgagataatcatcactgttagcttttatcacaatgtaagggggcataaataccgcgaatttgacatcttgtcctcacaaacactggcaaatttaacagactcgttcaagtgctcatcagaaatcatatcaaaggactttcatctcaacatcatggttcgttttcactaatagttatgtcgtatatataattttagggttcttgttatatgattaacggtgttttgtacccggatttgaggaaaaaagcggttgattactctgaaaatctattggaattttacaaaaataataagttgggagttctaaaatctgacattccaattgagcagaaggatgctgttctaaacaacattgattttaaggtttatgattcaggatactttctccattatggagactgtgagcatagattcacagtgacgagtatgagagttttcgataaaacacgcgactgtccttacgtaaagtgttacccagtttgtacttttagtccaaaccagcacaaggcgacttgtcaagtttgcaaagccagtgaagcttcgaagataacgtttaactgcatacttttgcccgaaaatccatcatacttatgtgacgattgtcacgatacttttaaacaaattgagattgggcacgatgtttattttgatgagggactaacgccttccatcaccatagagtacaatgaggattaattaatgtgtttaaagcatttgctaagtttatttaactctgaatatgtaaatattatatataacatggtatgtataatcctgagtgttaaatgtgtaatctcttaattaaaattttgataataatatattatctaaaaatcaattaaaaaaattaagatggtaataataatggtttaccttgcttaagtgtaatggttgattggtccccatttctgaggaatctccttgggttcataatattctaaaatatccagaatccatatttttaatcattgggttaaaatcttatttaattcaacattattttttcacaattttttgtgattttttattatactatcctctgattttactttcccaacacaattctactttaccatatttatattacattaatctttgctccaatttttctcttcaaagaagttgatttgaatatttatcggaaatgggtaaattattaaagccaggacgtgttgttattctattatctggccgcagagcaggctgcaaggccgtcgtggttcaaaccaacgaaagctctagtaagaaaaggccctacttgaactgtcttgtcgctggcgttgaaaaggctccaatgaaagttactaagaagatgtcaagcaagaagattgagaagcgacttaaactcaaagcctttgttaaatacgttaatgttaaccatttaatgcccacaaggtatttttattttttttatcccattactgagcttttagatatattaaatcatttctaccaaacttataatatttataggtacatggttactacaacactggaccccaaatccttagtgtcagatgagcagatggagaacaaatcatccagaaaggaagcaagaaaatctgtaaaggctgttttggaagaatggtaagtgcagagtttataatttattcttagcttttcaaatcctgaaaatatcgacccaactcagaagggaactagggatacagcctttttaagaaagaaacttcgattttaatctattatattactttatacgcttatatatacattttatacacttatttacactataaacttttacatacattttataaaattttgtacatttatatggatatatgtataaattttactatattagatcgaagttatcttgtttattgtttttcaaaaagtcgaaagagtctgttttcttgtccaggatgtttgagagatcgacgttatcaaacaggtccagattgttatcaatgttgctgacagtaggatttagggttgagttatcgggttttaagtttggctttggcttgtctaatgaaaggtcgagtcccaacaggtcattattgagttcctgatttgacaagtttgaggttggagcagtcagaccaaagctggctgaatccgatgatttaagacttgacttggtatcagaagtgttaaaaaataagtcgaactcattcaccttggactgggatgtttcaaaattagcctttttaggactcaaatcaccttgacttacatttgaaaatgatcctgttttgtctgtaaacaagcccattgcatcattcttaaacacgtctgaaacatctgaaacgagagtatctttatcataggagtcagttttaagcaagggttcgatgttaggtccaccggtaactttgttttcaacaagattcccgcctgtggttagcagattaattagttttgaggctttgtttgaaagttgagtctcagctttacacttctcaaagataggcaccgctgttgttccgaggtgatttagggtcttttggtccaagttacccttaagaacaagtgactctagaatgcatagaatcctaaagtggtactgccactttgaggacctgacattcagatgctttaggagctcatcaaccaccaaacccttatccatatggttcagtctttccatatactcctctattaacctgggtgatggtgacacctttattccagtaaatgttagcatttccttcacgaatgctgactccacttctcctaatcaaatatcaacacgtgaatactagtaaattacgtaaatagtgttaatagtatactatcaagttaaaagcaaattatgtatttactagtgtcaacaaagtcaaaagtatattatgtatcatatagttaatattgtgaataattaaagaaatacctggaagagtaaacttgtctttagatgcgggtgaagaaacgggattagaaaaggacgtggattgttgattgccgaataaatctagtgatggtacacttgagggattaacggctgataaagaacttgcatttgagaaagaaccacttgatacactatgtaaaactgtgttaacacttgactggtttgaaaaggcaacaaaagcttgacttggagatcgagcgctactgggctgcctagaattatatgaagggggataatatcctccggggttataggtagaaattgggggaccgttggaccgattggagttatagccaaatccgctgccgtatccgctagaacaatttgactgagtcctactattgtacattgagttatttaagttggctgagttacttcttcctagtgatgttttgtttccaaggtacttttcaaactgctcagttgctgtagttgagattacgtttcctaccttctcgatcttctcaacgaaatctgatggcaggtacttatttgctgcatggctaatcatcttcagggcgctgtttccagcgtttttcagctctgaaactgtgggtgcaaggctacttggtatagagaaagagctggtctgactaggttgagttttgggcatatttgggtttccaaatcccatcattgaggtgtttccatatccgcccatgcctctggaagactgcggattatactgatttggaggatttgagccatatccgaaattaccagaattataattggaaggctggctgtattgactgtaatccttgttaccgaacccaaccatcttatcttccgatgatccgaaactattatttgaagaagaatcgtacgaacaaacaaccttgatgagatcttcaaactcagacctaactgattttgttaattgttcggacttgaaatcggagtaaggagctctatagtttttgcactcaagaatctgctgagactgagtaattttcggccttatgaaatcttcaggaaatttaatacacaaatgctttaataattttaaacactttactttaatataaggttctcttcgggttatctttttaattagataatcttcaatttcgtttagttttgacaaatcttttcgtatatattcaactaattcattatataggtaacctggtggctgttctgggccatctgatgttaatttggataacaaactacggtgagacgacgttaatgaatcaatgaattgactataattcatcttacgtatgaattatagctcttgcaaggatcatcacattaaagtaatttccatacaaatttaaatgaaataaaatcaaaattaaaatttacaaaatatactgttttatggagaaaaattttctatacctcatttgtgggtaaaattaagcatttaattcatgttttccaacacactttatttttttcttaataaaaatacattataatatttatttttatctttaaaattgcccatatgctagtaacttcgtgtattataattactcaacacattagatggtagttaacaaattatactggaaatatctccatatcaatgattacgaaaccaactctttatacttaaaaatattattcggcctataaatccttaaatcagtaactttataggccaaatcttccagtatcttatcatttataatggaacttgacttatcagattcggaatttgattccagtgaatatggaaatgagtaatcccaaacacccctaactgacccaattggacttacatccttcttcaccagtttatctgaaaaatatgttaaaatttatagttacctcccaggtataaatcggctataactttagctttaaatggtctagtctacaaattatcattatttcagcttcttatttatactattaaataactattttacttactgtataattaacatttttgattaaaaagtactgattattcttggcgggtgtgttgacgacatagtcaacttcatcaattttaaaaatcattctcccattagaacctttatcaccacttggttcagtgttacgtctatacttttcaggcttccaacagagacatccaactccgtttagtgggagtgtgtgtaaaagttcgaagagggtaattagtgagttatctctccttaggaactcagaaaaaagactaatgctaatatcttcaggatttagatatcttttctgatgtgagtgccaagggtacttatcaatctcaggccaatagtatactaaatccaacttgaaatctttgtaaataaataattgatcaattccttgagctaataaatattgtaaatgacataactgaaaaagggaatgataaatagcagggaatagtaatcttacgtggagttcttggatttctggctctataaactggtttataattcctatagtaagggtatagtatgtttttaagaggacgaggtttcaaccgatgtgtaccaatggcactatggtagtggattctaattttagatgcggttgaactagcacttttaactcttgtagccatttacataggtttaatatacacataaaaataattacacattggaagacttagtttttaggggatgctagtgcttaaacacattcagacaccttatagtgcaaaatatatcctacaaaaactaaatattatttttcataaaagttttaaaacaccataaattataaatcataatataatatctttttaagataaaatttaagactatttcaatgggcttgtggtgtagtggtatcacgttcgcttcgcatgcgaaaggcctcgggttcgattcccgatgagtccagttataatctaagacaaatacttaattctcaccattttgcgattaaaccgctgttttctatcaccttttatacattgtattaacttacaattcggagcacatctcaggattctttataaaaaaaagtaaattaatgaataaaactattttactaattgaggacatgaatttgcatacatattcgaatcaatttaataataaatagaatatgtgtatgatgatctatgataacacagtgaataataaaaaatcaccatctctgtttaattagtttaattactctccggccagttaatgtgtcacaattgcacgaggaataagtaatttttaatgtttaaatccattattaaattatcattcttattcttgttccccataggtaggctattatatcctatcccacatatgattcctatattattcattagatttatttattttattattcacccaattatataagaaggttcttacggtgattattttttacagaattgcaataaaaatttgattttattttgaaatggctaaatcgaagaatcatactaatcataaccaggtaatttatcttctttctttaatttacttattatttctacttagtaattaaaataaatatccttttgattacatttttcattatttctttagagcaagaaggctcatcgtaatggtattaagagatacaaatttcctaggaaattacctaccaaaggggtatgtttatcttacgttttaacactcaaatatattaatttttatcaattctattatttaattgttttagatgtgcccaaaatttttgaggaaccagaagttttgtaagaaacatcaaagggaatctggatctgtctctggttcagaagaagaataaactcgtaaaatcctaatataatctggtttatttccctccatttacttgtctatgctatttttatgaatttataattttacatgtccctttagtttttattcttattatttgtagaaattactctcataaataccataaatacctaaatttaagatcaaaatacaataaaataatggttaaataattatatttacggtataataaagtgtggaccaatcgggattcgaacccgagaccttttgcgtgcaaagcaaacgtgatacccctacaccatcggccctcatttccagctattaatttttcatattaactcagtcttctcacttgaacacacattctactataattactaccatcatttcaataaaataatattttttttatattttcacaagattcttttaaataattctgtattatttcatttaaaaatttattttaaacaatgtttgtataattaatattacttttaattaacttttttaaaatttgttttctttgtaccataactttaattaaataatggttgacaccaatgtggtggtccctggtgatgttgttagctcagattcctcctttttacttcagggtcacgggacttacgtttccgataaacaacttagggccagttatctgggctcagttaaacatgtataagcttttttagctcaaatcaaatcatatttatcgtacattatcaatacacctaactatttggttatatatcacgaatctaattctaatactagtactaaaaaaaattttaggtaaaccaattggtttatgtggagccttttggtggtaaatacgtcggtcaaataggtgacattgttattggagttgttgacagcattcagggaaacaagtggtttctggacgtgaatgctgttgagcttgctcagttatctattctgcaggtgaacactgaagagttggcgaatcgtcgtaaaattgacgaggacatttatgaaatgagtaacttgtttaatgtgaatgacattgtttcttgtgaaattcagcgcatttcagtaagttaactctcgaataatttatttcctagcccactggtacaataatgctccaaaccaggactagtaaatacggtaaacttgaaaatgggattctcgtcaaaataaaaccaaatttggtgattaggaagggtaagcacatttacgacatggaatgcggtgtaagaataatactgggatgcaatggtaccaattaattttttaattgatgttcaggatatatatggctcactagtcaaaaagcccatgaattgctcaagaaggaaaaggaaaactctcctgagaaggccaatttcatcaccagagtctgtataattaggagtattttactaatgttttcttcaaagctaataaaggtaaactttgacgtgattgaaaaggcctttgcaatctactctcacctcttccctaacagatgtgatatggataaacagatggaggagcccatactctcgaatttttaagcatttttttaattttttagaagttatctactctggctaactcttaagtttatatattttatattcagttgtaactgtcgcatgaagccaccatgtagcatggtggtgattaaaacagtatttgtataaccttccatgattaaggggtcttttcagacacctatgcccaggaggtaatttcttacttaaatagataaacagaatttgaacttttagcaagttcaatataccgttaccttaaattgtatacaaagagtaggagattattaaattatgaagattagctttcgttaaccaataaagaaatctaaaaaatgaattaatcattcgaaaattattacttaaatttatataattatttagtatagtaaccttttgtttaacgcgttcccttctttgagccttgctaattttaacgttgcggacgtaggaacctttagaggtcaagaccttgctaccctctctaacgtgtttaagcttgcgtttcggcttagttggaagcactgggttctttctaatgttctcatgggcctttgcgtacatatcctcaagtgattcactgtccaacccgagtttcaagtatgctgaaaactgcctcttatacttttctgggtcttcctccttgaggtactccatgtagtttgccacatgtgttccgaaaatcctatccctgtgtgcctgagcgtcatagcttccgttattttcatcatcaacgctataccctgggaacctcttttctgagtgaggaacgtgcaaacctccgtcacatgctcccttgagggctccgaagactctgtttccagttgtcacgttcttaattccaacatccaaaagtgccttgaaagggcgtctttcgttatcctcttcttctacatggtacagctcaccgtctgcttcaaccttccctacaaactgagagtccaacttgagcttggtcagcaaccttcttgcgagaaggagtcccgtgcagtaagcagctgcgtagttggtgaggccaaccttgacaccgtaatgaaccagttcagaggagtctgctgatgcatggaccttgtcaccaactagggtcgacgacactatttgacagatgaccctcttgtttgtaagtctcacaactaatctatacttgggtgagtcatacttgttcttgtcctgggcaactagacgtcttctggcatagtaatcggtctttccctctaaaaacagattataaactcaaaataatttatttctaaatcagaccataaagtaagattataaagatttagccaaataatattatggagaataaaataaaagatgtaacagacgacaggtcaaagtataaagggttatactttggtttaagtcagtatttgtttctgcctcatggtcaatgttacagctttaaaatttgtaaatttcacatttggcaaatacaatcagatatacaacagtgactatgataggaaaagggctaacctctgcgacgacggaatttgacctgaaatcgcctgaaataggccttattctttacaactcttaagaaagtcatttattttatcaacttcttaaatctgatattaaaaaaatgcggagatactgtatagattttggtataaggtcaaacactataacaatgttgaattataaaccaagtggttaggatatttattagagccaacaatctaacaaatatccgcaactttcaatggaagatataaataatataaataatataatagataaaaatataaatgacaattgtaggactaatttccatcattccaaatggggacattatggttatcaagtcacgatataactataattctaattattcaataacacagtttatatataatcattactgtaattagatatgcgattgtctattttattaggctcataattttggaacttcttaatactcatctgagtatactattagcttatttttttaaatattttcctttatatattcatactttacaacaaccatagttatatactaaattttgtgttatattgacatagaaattaagagtagcattagttatctaaccctcttcttccatatacacataaacaataatcaaaattctataaaaatcgggtttataaaaagatcttccattaacgattacggacattttatgtaaaactctacatttaaaatcttagttatagatatgtttgagtgtaaaattatataattataattctttatatatttaatatatgagaaccatcgatgtgatatatgtcaatttaatcatacaccggtgatagaatttattatggaagtttttttaaaacatattttcaataaataactgttcaagttaattttgtgctcataatgcatattatgttaaaattgacgaatacacaataatctggaattgaagaaatttaaatcacatagacatgaaaatcaattttattgtaggtgaatttaagagaatccaagcgtatgatcacaggtgatcttgacattcgtctcctaccttcgatccccatatacttggggcatggtaaaataaagttgctaattatagtataattatttattaaatatttatatttatatttttttatttttaaattggaagtttactttatagtatacttaaattcttctagatttatcacaggtttgtctcaattattctgattctagattcatgtgtaccatttaacctgtttaatctatattttatcttgttacaactctgaattatcctttatatataactatataaaataataattcattaaactaaaaaataattttacagatggctccaacggtaaaaaagagcaagaagcagccagccccggctccacttgctaaaccaaaagaaactaaggcaaagaacccattttttgagagattgccacgtgattttggcattggccgttctatccgtccaagagttaatttgtcacgttatgtccgttggccgaggtatattaagatccaacgtcaacatagagttttactccaaagacttaaaataccacccgctttaaatcaatttaactacaccattgacaagagtcaagcactccagttgcttaggtttttgagtaaatacaagccagagactaagaaggagaaggcagcacgacttttgaaggatgcagaacttgcagcatcaggcgcagaagtggcgaccaagaagccttttatgcttaaaagtggtcttaatcatgtaacaaatttggtggagtacaagaaggcgaagctcgttgtaatcgctcacgacgtagatccaatcgagttagttttatggctccctgcactatgcaggaaaaaggaggtcccgtactgtataattaaaagcaagagtaggctagggaagctcgttcaccagaaaaccgcatcagtagtggcagttgacaatgttaggaaggaagaccaggcggaatttgacaatctggtgaggacattcacggcaatgttcaatgagaactccgagttgaggaagcgttggggaggccacatcatgggaatcaagtcccagcacatgatagccaagcgtgaagctttaatcgctatggaaaacgctaagaaattaggtttaacctataactaaatatttatacaatgctctaatcatttattttacatattttattcattacttgttaattattcgggcattaaataagaacttggatattaagtgaactttgaggatgttaaacgaattttcacaatgaattctgaggatattaagtgacttttgatgatttaattaactttgaggatattaagtgacttttgatgatttaattaactttgaggatattaagtgacttttgatgatttaattaactttgaggatattaagtgacttttgatgatttaattaactttgaggatattaagtggactttgacattaaaagtttattgggatatcaaatcaagcaatgaaatttaaaatgatgagataaaaattacagacctgttctgatttttgatgaattgtaatctctgattagatttagctgcgaagccacgtgaggctatttcatagactctgccagtagtagcttaaaccaaagttctaataggaaccatgttatcagttaacatgggccgaatgacgcacattaggaactatttatagtttacaaataaagcaacgacaacggttaattgcttgtttttgggcaaagaattaactgtattggaagggatagtgatgatatttagtttttaccatctttcgggactgacatttgatgaactgaagatctgatatcccaaaaataacaaacacatattaattgaaataattaatagttcagcaacggttgttcaaattcgcatgaaaaagcaggtcataatgtattttatggcctcgttgaacatgcgtacaataacagagggatagttagtcgcatttacatgagactcgttcccccctctaataaattttactacccatatttacatatggcttacatatcaattgcaattatagttcagatattgctttaattaaggttcatgaccgtttattttccaagccattggtgttttagcgtaaccttggcctgtaggtttattggttttcctataaatagatgcccattgaacgagctctatttcaagatagtgattcattttacataagttcagggttcatcacgaaagtgaagttaatgaaaaaccaagaataccatttgaaccaagagaattaagactcaagaatagtccgagacaagaaatcagtctagaatgcatacgctatatatagcttctatgactagtcatttacacatgacgattcatattaattagtcaatgatctatgacgattattaatggttgatggttcataaagatctataatgaataattatgtaatcgaataattcattagactcttgaaaggactaatttgaggattactcttaccagttcataaggtacgaattaattcattcatagtgaacttggaaccttttgaggaacctttgatgaaaattgaaaatttgagggagattcatctggccgaaataccacggtattaagatttcattactttttagtttccttttttgattttgattttaacttgatttgcatgattaacggaaagttcacttgaacgttcattgttgatttctgatcatgattacgaatgacacaagtaattcattttcattctttgtagactttctactactaaactgagatcctaggtttaaaactcttgtttatctccactgcggagcttgtttcaatagacgccatttattaagcctaagtcgctaactactactaattatctctaaatacccctaaataagaatactttcgatatgaataattaccaactaccgagatattagcctcagtaagacaagatactaagataattaccggtattgactaagatataatcagtatggccaagatattagactcagtatgagcagtatattaacttctatgaacagtatattaacctcagtatgactaagactaattaccagtatgactaagataactaccgttatgtatcataactttgttaactatcgaggtaaatctatatctatggtaacactcgttaaacgataagttgttaactatcgaactaaatcgatatttcataagatttgttaactaccacgaactaaatcgatatttcataagatttgttaactaccacgaactaaatcgatatttcataagatttgttaaataccaagacttaaatcgatatttcataagatttgttaaacatcaagacttaaatcgatatgtatcgtaagagattaagtcgatcacaataaatacaaaccagtaaaggagtaacctttaaaagatagctagagctaatcagtttcgatacgataattactcgaactcgataactagatatctcaaggttgtggaagtgatgattcaacttgttcttcctaatctatatgtgtagaacaacgagacctgatctgatcccaaccttaaactatatatatatatttatatagatgtatgcactagttaatttaatgtattactcttttacattacatgttaagtatattgtggcaagtattcataagtacatacggtggagagttatcacatatgtgtagtatattacatagtgtacaccacagtatgtatacatcacgtacattttacatatatatacattaaagttgtacatttcatatagtatatacaactgactgcagacattacacagcacagatctgtgccgtttatggtacaaagattaaaaacttaaaaatttaagatgtgggtttcattaagtaaaggacagtgtcaacgacgagcgcaataaaagaagcaacgactccaataagggatttctgaagaagagttaagcttaaaaacatacataaagagggtctttgaggccaagaaagccagaaatcgagtaagaaccaatgaaggtaagagcaacaccaaagaatatgtttaagccagaactgtaaaagataaaaaacttgaaaaactaacattatgggaggtttgtactccgaaaaacgagtttgactagggaccaggagctctttaatatccttgatcagacgctggtacttgagttcatgggcagttttcttggaccactcaatgtcaattctgttctcaattttaggaaatttacggtctggaaaataaattattaattaatgaaatgatgaaaataaaatttaaagtgattagagtatttaagatgaatataataattccaaatgattagagtgatttaagatgaatataataattccaaatgattagagtgattcagggttaaactaacttgtgattttagcatttttaagaacttcacttagttcaaattcagaatgatcaagactagggaattcaagaaccatggaataataagcgtcaacctgtaaaataagtaagtatttgtttagtaataaaataaatgagtatttggtcaaaaattgtgagaaaatatgaattataccagtgaaatgaaggcgtcgagatgtaactcatcatcagaagacatttgcaaggcaacgtttagaaggttatcctgattagagtcattaagatcttcgggagcaggtttaagttcattaaaagtgtcatgatctttatgatcatctgtatgaacaccgtttaattcagggtcatcagaaggtttggaacctttaggactgtttaaaaatttagatctgcgataaggacggttagggagaggaaaatcagaaacgttagtgtcagaagagcttaacactttcttccgaaaacgaataaactcgtccagaaagtcaactacctcggtggtcttgctaaaataagcagcagaattagtagaactattcatattccataactgtagggatgaaataaaaaaattaatttaaaaatcaagttagatgggttaattcatgataaaatttaaaactagaggaataaaatgaggaataaaaataaaataaaaagaaattataaattaaggataattaaatcaaatatttcacattaaaatgaattcaagattaaaatattcaaatcgaaaaaaagtacaaaatgaagaagttgtgtagatgaacccaaggaaagtgataagaagagtattagaaatatttttttgtttatttaaatttgtaaattatatcgcaaaatttattaatttatataaattaatgtataagtagcttaaaattaagaggtgtaaagtagatttctaatttttgaataatgttatatgagcctacatcatggtactcatattcacaagtattagatattttcaaaagattatccgacgaaaatcaatatgagtcaattctgttccaaatagagctatggaaggcccgaggaagggtcccggcagccattcacgcgacttacctcctactgagcgtaatgctatcacacaaaaattcaaatttataccaatcaaacatacgagatttgtacgcaatgtcaataataaggtatttcagcctgaatatcacagcatttgaattttctttactaggaaactatttaattaagctagtaccattcattcagagaatattaattcaccataaaattcttacattaggactgtaaacctgctactggaccaggaacaagattcaatatatgcaaagagcatgatacttatgggaaaagaagccaatttcccggaaagcattattaaatgccggcacagatgctcacacggagatattccagacttggaaacactaatgtttacactaaaagatacactcaattatttgtacagaaaatactggtacggaaattatctatacccataattagatattcaatattctcttcaatattgatttttcagggagaaacagtcaaatttgataaattcaaggctgggtgacgataaccatcacacacttgtgttattctcagcatttctattaagtcgctctgtgattaataatgtagaccatagtttatatatacggcccttaaataagaggcgatttaaacttaaacatgttttaaataagaagaaaccacaaaaccttgtaaccataaaatcggtactctcagatagtaacaggatactataccttgtttccggagggataaatctctcaatatatagatttctaagttttgtaaaaaagaagaatcgtcgtttttacgcaaccaggtcatcaatacagctattcaactgtacattaaagaagctgttaaactgctgcctaaacgaggatatttttatctcacttttcgttgaatgttttttttgtagttataagccatttcagtcaccaatgttcttcctaattctgttctataccatatcacaatactcgtttaactttacaatcaagtaactttccatacaaataatgctagttacactattataatatatatacatttattgatagtaaggaattttacaaatacagtcacatgtattaattaatttataggtttgtggcacacattctaaattgggtttttgatattactgatatgttcacagatataaagaatttggaaaatgactctgtaaccaggagagcaaatttgtacagtaatgtgttaatcggatttgattttaaatataactatcctaaccataataacatgaaacatcatgttaagaacaatttcaactcgtttccaactaatgaagcatacagaagtaatgtgaacgagtggctgctagtgctactggagtacgggttaagtttaaaaaatggtaaaatttccaccaatcacattaggtttttgaggacatttagagttttaccaaagtctgaatatgaaaaaatgctaaactacgagtttacggcgctttcaaggacactaactgcagttgctctcctactgccttcctatgtagtcaagatatcgtctagacatgcacaaaattctttctctacacctaaagagaattcagctggaatctggaccagggacaagatatcacacgcaatagggcttggaaattggataagtttggggaacggaaggtacatgttcgaggtcgcgcatgaagaggtgaaaaaaaagacaattttggaatccgagactaatttgaaaacatatacagaaaaaataaataaaaatttattaccaggaacaatatggaacaataaagactgtaaagtaagacagacatttccactgggaggggacgacattgacaccaatgggaaaatcatcttatgtctggaaaaaataaaggataaaaatttcataaaggtggaaggatgcgatgagaaagtggcttgtgcgaaatctcagctctatagcatcaacaatgacctgaaattcgaaaaattcgatcagacaagaatccaaaggaaactactaaagatcatttcctcaagcacaaattgttgtaaaaaaaatctcaacaacaataatctaacataaaacgaaatacatgtaaataagtttgcaattttactaatataacaatttatgtgtatctaaggtgttgtggacattggaaaatagaggaaaaacgagctaaaaatgttattttttaaatcagtatcaaaaccttctaaaaatgttaatttaaatataataataaatgtacagaaggcggctttatatttaatattttacctccataacctgatttgttccccataataaatatccgatctattaatgaacgggaggtagtaattgtatgtctaaacgattatctagaaatcttagataattcttttttaatttgttatgtattttttcgtttaaatgtgtcatatttgttcatacttctacatttaattcatgaatatccatttttaatgtattctgaaatttaaaaatttttttatcggttaacttccacgactagcatttgttttgttaaaaacctgttgaatttgtaattaatacacacatttccactaagttgtactctattgttgtagaaattgtccaacgttacacaatttcttgtaaaatttgtcattctttaactttttaaataataaaatgattatttttattaaggggattaaaatttgcttgtccaagattattacaaatattacaatgcagctcatccacatttagactattttatagtaatacccattagtattttagctcaattgtttgcttaacttgcacgcgacaaatccgtctcaactcgatttctttgtttcatggtcaactgctcaaaaacttgggctgaaaagcccacagtcgcagagacagaagtattagataattcagttttgaacgtatcagaagaagttaaagaaagcttctttgggaattgggctaatcataacgatttgaccccgtatatcgaatcaacatcctcttcaacaacgtacatttcagaaactggcttcccgtcccagaacatttcagtcgaggataattttaaccacgtgagccaagaggaagattggaccaacacactagaaacatgtctgaacagatcaattgatccaaactttagccagttttacgattattcagaaagagaatcaagaggaagcttcgaagaacagctgaataattattttcatgaaaacattgatggcattcacagcgattttacaggcacgttcgacgatattgattttaagctcatgacctccatcgatgacattgactccacacatacgaatattgatattgaccccaatcttatcaacaacattgatattgagtctaagctcctgaaccctcttgaaatagagtcaaagcttgtaaggaaattgaacaaccaagatgatttgattatccagagaactcctttgaccggccgtaaaatgtcaaactatggggaatcatataggatgaatgaacatagaaagataattaggaattcacctgaaaatgacctaccaaatggccataacttctctggaccaggtggtattacaccagagcaataccagaattactgtggaattaaccaacaagggattagtaataccaccatgagtcagtttccaggtcaaccaattaccaatgaaaatacgagaacgttgacaaatgagagtattgacaacgttaccgacactgttagtgacttgattaacgactcgatcagtgatagcatcactgatacaataagtgagatgggcagcatgtcgtcaaacgttaacggtcagttaaaaggtaatggaagtgactttgataacaacttaggcattaatgcaaattacggtagttacagatgttcaggatccatgaccccaagtaacggtccttccaacggccaacatttctcgaactcgatcaaaacgtcagtagcctcaaacgaccacatgaaccagttgactggctcattaataggtgatatatttcaccagaacgagttcagtgggttatcagaagtcggcaacgattcatacaaggaccaagcggactcactcagctacttcaataaggacatgattaactccatcaacgagtcgtactacaggacgctacacaataacgttgaggttgagtacatcttcaacaatatggactctttatcaagaatggataacctcctcaccaaagatattgctgatttcggtgtcgcctccaaagaattgggacttggaaacggacttggccttgaccttatctcagattttagctctgataccatgacgacagacctcttgaacaacgacgcactgttctctgaaatttacagagataacgacatcgacgagtccgaaggatgggataccctaatgaagcgactttgcatttccaaaccagtaaacccgtatccaaatctatcaagtgataatattaactgcttgattaaggatagttccaatgcaattattaatggaaatgttaacggtgttggccccaccctagtaaacggaaatatcgtccacctcaatgttggaaattgcaatggtgtcaataccagtcatgtaaacggaaacaatgtcaatatcgatccaggaaacgaaacatttaattcaggaataccagtaaagagcaaagataacttaccaaccatactaccagcggatccaaacctaggttttaagaagacgtcactgtgcaagtattggcaaagaggaatttgtgctaatgatgactgcaacttcgcacacggaaagaaggagcttcgctcaacaattggagtctggagaacaaccatctgccaccactggaagacaggaatatgccgagtcggaaaggactgcagacacgcccacggcgaggaagaattgcagcctaagaacattccagccaacgttttgaaaaacaaactcctaaactccgcccggaaatatgagtacatgaggaagaagaaaagcgccttctagatcaccaatgctaagtcgcaagtgtaattctcacctgactttccacttgtgatcttagtgaccattttgtgcagtaattttataaagttgtaaaattatgaaaaacatttgttaatcttgtccacgagcaatttatgcttatttagtttatagtgtgctgctgctcattattcctcccgattttttccatcatttcctctacatattttgcttttatttcaatattttatatttatgtaatcttcagcaataatgttgccgaatcaggttagggtagataagaatccgtactctgaagatgtgttaaatcagttcaactcggagtggaacggattcgtagactcaaaggaacatgaacctgatgaggattccggcgaagataagtcgaataactatagaaacacagatgtatattttaattcatattcatacattggaatccatgaggaaatgctcaaagattccgttagaacaggtaccagtgtttccataatttaacatttttaaagtttaaagtttttgcaatttatttgttaggtatttattacaagaccattatgacaaaccaacacctgtttcgagataaggttgtcttggatattggatgtggaactggaatcttatctctcttttgtgcaaaggcgggagcaaagaaggtttacgccatagataacagtagcattattggtttggcaagaaaaatcaccaaagtcaatgggctgtctgacaagattgtctacattagatcaaaagttgaggatctagaagatgacgttattgagccagttgatatcattgtaagtgagtggatgggttattttctcctctatgaaaacatgatctcgtcagttttatactgcagggacaaggtattttctcaactattttattttattttctttagtatcttaaacccggtggactaatattccctgaccgtgccaggttatatatcgcagccatagaagatacagaatacaaggtaatataattttttatacaaacaactacttacacccttttaacactatataacactataatatactatatactactatataacactgtaatttactgttaaatgttggattagtctgaaaagtttgacaagtgggatgatacctacggcttggacttctcgttgatgaaggaacacttaatggaggaggcgttggtggattttgtggatgaaaagtctttagtaactaactctttttgtatatttgtaagttttaatacttaatagattgtgcaggatgttaatcttagggagtgtagtgtttcggatactgattttgtctctaatttcgttcttatttctgagagaagagattacgttcacgcctttgttttctggtttgacgttacgtttacctgttgtgataaacctttgaccctaacaaccagccctaaatccaagtatactcactggaaacaaactgtactatacattgaggaggtgttaaacctccaacaaaatgacttaataaatggaatcatcgcagttaaaaagaataaggataaccctagagatgttgacattaagctgagttatcagataaatggtatttttctcctaattaattcatctttaggaactgctccaaataaccttaagtgccattactatcgcattaaataacattttggtctaatgtataaaatttataagtcatcatgtacaatagaatacaatatacaataaaacacaatatagtataatgtactatactatagaataatataataaaatacaacatataatatactataccataaaactaaacagtactttatattataatataataaaatgtatatttatgaccaagcattattagaaagttagtacttctctacaaaaggaacaggatctaaagttacaacggaatccttgtcaacattgacgaaatatccaggtgaaacgggcttcggttgccttttaagattaagtttctttccatcaagctttgcctttcttctgagctcgtcattgactgcaactctcttaaggaactcctctctgcaacgactctttctaacatgctcaacattaacgttaaccttcttcaaaagctcttttccacggaccaccttctttaccattaccccaagagccctcttcgtcacgttataaacaactcctgtccttccgtggtagaaggagtgaggcatgcccctatggactgcggaatcgacgtaaatatcaacataatcgccaactttatatgttgtcaggtatttcgatagaggaggcatgccatgacgacggaaaggtttggagaacttatgtcgagttctggcacgtttcccgtaagagtgtggcatctgaaacagaaataaaggataaatgaataaaattactatcaagaataaagattaaggaaaaattttaacgtataacgaaggagtaaattaaataattctcaacaactaaagtagggtggagaaagtaccttaaactatagattaataaatcaattaaattgtgataaaaatgtataaaaatagttaaattaagaaataactatttttaatttaatctgatgtttaaaactaaatgaaagtaaagttacggatggggattcctacttggtatagaatccccatctaagtgttaaggtcaattggtcaaaatattcctgtttacaatttatacattttaacacactataacattcatccgtcattttatttcaacttattcattcccataacttactcattttaatccaatagatactaatatattagtatatactaacaatttgattatgtgttacatgtggaatatttatgatagtaaatatgttacattgaacactaaatgaatgtgttagcatatggtagaaatgacttataaaattaaatgtgttagcttgtagaatctgtgttttgagtgacgtcgtcaaaaacttccacgagttttggtacgtccgttgtctcttctaaatcaccgtccttttcatgttcattcttaggaaggtcaaatcctgcagctgaaagctgttggaggatatctgggaaggaaagttccttttcctcaaccactccagttacaacaaatgtattagcgtttggagcagtttggatctttgggttagtgaatgtcaataacgatccatcttccttgagaatttgaacctcctctattccaggaatgtttgcagctcctattgagcgtagggcgtattgtaaccttttatcgtcgcctacatatttagtagttttcttaagttttctcctggcggttccctttcctcctgtttgtgttccagtgactcccattcgagatctgagcttttctcgcgctgccaacatttcaggggttacagtgtcaactgtaaccggattcacagtttccatcattctcaaaggctgaaattatgtattaaactttcggaagagttcaaataaaaaattttagtccaaaataaatgggaagtttttgttttattgattaaaatacatatgggaaactttaattgtggtttgaggtaaaatatatattattccatcaaaactacggaaacgtcaatgtttatattgcattactgaactaaatcaatgtatgaaattcacatatataaaaatattactaatgtttaatggaatctcatggggttaatgtgaatccaaaataacattaactagttaattttatgtatactatgttatctatgttatctatatctatctagtctgtttggtgttcggtttgtttaattttaatttttttaaaacacattcattacttattatatttttcagtattttaatattttttctcaatttttacattgttttacttcattattttaactttatccaatataattttaatcttctaagctatttatctgaaatttttatttatgtgtcgttatattttcctaccacaatatattactattatggactttattcattcaatgttctatggataataaagaaaatgtatccaaaagggtttggaaagaagtcattgatccttcttctcgctcagtttattactggaacatttcaactggtgaaacatcctgggtgaacccttccaacgacgaatcttccaaagattttgattcctttgaggatagggtttctcatgatactaaggtaattattgacaaactagttcacagggttgaaaggataaagtttttctttgacgagattaacttgataagtgatgtttgcgactacactagatcccaggatataaattcctttaaagtactgcccatttatatagaatatttcaccatgaaatttaaatttacgtgatttaggagactattgagcagtgtttgactgatttgaacactatattagatgttgtaactccaaggactaaaacacagaagaagtattccgccttaaagaaagttttaactgaccacagggtattcttcatattaatttatacttattaattatcttttttactgtgtaacataccatttattaattaattttatcagattttaatttctatcttttagaactaccttaagaacaacaataatgtttctgatgagctgataaacattgttaactacgctaaggctgagattgagcgtggtttggacaatataaagaggtttcctgcctccaacgatgtgcttcttgacgactttaaagtttatatggagaagagaaaactcgatgtcacaacggacaaatcgcctaaatctatagagtttttgaaaaagcataaagctagtttagaatcacccactaaacctgaatccactcattttcatcagtctgatccaattttatcaaaaacagttgataaaaataggagtagctccttgaaatcaatccatgaaaggtggaacagagcttctgaggtcatagataactctgaggatggctctaagaagccaaaggccccaaatgtgccacaattccataacaccgagaaagataaccccaatttggtccccatcaccaaaccttggtataagaattaatgttatacttataaatattaaaccttggtagcaatttgagtaatttcagcaatcaatctcttagtggtattaatttattttatatttcttaaacagtatttcgaccaattttgctcattgttgtggtcagataacaatatccatacacattaaaaaatatatctaagggtatagtttgggggaaaacattacagataactgtattaaggatacttaagaatcaagaggtactgaaaccgaatctgcattagggaatatctttgtcaacggcccatgagatgagatccacttgacgtgaactcctttgttttcgagtcttccttccgattgatacttcaaatattcctccttcgtaaatggagtgaatccccatttgttcgaaacgaatattttttgtcttcctgggaacttgtactttgctcttctcaacgcttctattgcttttggtaccaagtgttcctaaaaatgatttgcttaagataaattactaagtatttgagtatttaaatatttaaacatttgagtatttgaatatttaactagttagaatattacccttgttctaattgacattaaaacttgtccaatattaactctcgctacaacacctgttggttttccaaaagctctgcgcattcccgtttgcaggcgatctgcacctgcgcacgaaagcattttgtttatacgcaaaacatggaagggatgcactctaactctgatatggaatgattccttaccaccagatttcaccataaactaaaatattaatagattattgataatcaatgatatatatatatatatataattttgtataattctacaatgaagtttgtttaattaaaagtaccttgtttgcacagatcctagcagcttcaagggcttctgatgatatttgctcgtattcacctgatacgatatggacggcgcatgggaaatcgtccacatccgctcctttcaaacccatatcataaatccttatcttagggtctgggacacctctacagaaacgggattttgggtatggtttgtttttgcaatatctataacaccttgctggccttctacccatttttataacaaaccaactttaaaagtcttaactctcttgataattaagaatttctatgaacttatagttcgaaatctgaaaaataattgtaggtgatggaattcgttggatagagttataactagtagtttaactgtgattaactgaagcccaatttttggaaaaaattcaatagttcgggtcttccgggaaattaacgtaaataaatatataaataagggataaataggcagaactaaccttataatattattactacaaaacatataatgattcttgttctcataatactaaatgtgggtggggtggtccaacagtgttaagggtttaactccatgaggatcaagatataaattataaagatgtaatacaaatcagaaattgataaaatattaaatttatgctatagttccttaagaattgcacaggaattgtggttaacacatcacaagttacgatacaattacttcaattttagtcaaataatattttattatacactctataaaccaattttccatggtcacatctcagtttaaaatccaatatacacaacatcatgttggccttctccaatcataaatattacgatacgttgtaattcaaagcttcttatcactcagcagccctgccaccttcttctcccttataaaatttgcaaatttagtcaaaaggttaaaattttcataatctttgtgggcgtaaatatcctataccactagtatttcgagagaaatattttaccttaatcggagtttgtcgttttggcggtcttctatactgattccatgtaactttaacaggttctgggagagaagaacctaaatatatttaaatgttatcgtttataacctacctgagagtttacaaattcttacacattctccgttcatcatatatctccttttaacaattgtaggcttcctataatatatttagttaatgagaattataaagcaaatttatcgtacttcatgactgggtccaccagtgaaatgttggtaacatgtattggcatttcttgtgtaatgagtgacggctttttgccatcaaatactggattccaaaaggtttctcgctaaaataagcgtcaaaaaatattgttttaaattatttttgaaattattaatatatattaccatattgcagttttcaacaataacttggttcttcttatggaaaatcttcagtattacaccttgacgatccttatcctgtccatgtaatacctgaaccaaatctcccacttgcatattcaaacactttgccaaatcaacccttcttggctgtcttttctcaaccaatggtttagggatcgagttatactttgaaaaatgtaaaaagtagttcctatgtggaaccttgcgattctttaccatctgaaatgactgctgagcagccttaaaatatttagacattcttatatcatggcaaaattttaatgttatttaaataatttctaccaaaatgtgtatgtaatctttatattcatcacccaacttgcaattaatttactttatttttatttaatttattacctcttatacatatatattcacaattatttatttatatttattttaatatttatttatatatgtttgggtatttaagaaggatggtactcagggattcctcccagctacagttccgttcgatactcataccctataataactgttcttgctcattctctggactttagtctctggacagggatacgcatgtaacatatacgtaaaaacagttgaaacaacattaacaattatcgtacaggattcctcacggaattagttttttgatgttttctattctatctttgatagctaggtccagttccttttcaagtggtgtcgccctcaatactctctaaaaacaattataacactataaccaacgtattttatcctgggctcatccataaaattctcaacggtagccttaattttaaaaatatactcctaaaattttctttcatttgttttttccataccgtcagtctggcgtcttcaaaatagtttacgaaattcttttcgttctcgtccgacggtccgttttccatgagttttatcaatttgtatgcctttattcccatgatgctctaaaaattgtgagtttctgaactaatacctctcccacatctgacattgccgttgcccatatgtgggacgtctcatccacaattttaatgttgaggatgtacctaagattcatataaaaagaaaaacgtacagatgcactgggttcgtgctactattgcacttggggcaataccagatcccttgatcatttgtcattttcttacggcatccggtgcaagaccttttgaccattattttaatttattacttacgggaagcagaagtttgtatccttcaacacctcaatcaatgctctcgtggtgaagaccatcccgttcgagtcaattgctaaagatttataaatgttatattaactttacatttgaattggagtccttggttcgttgaagatattatgtgtgatatggtacaaagtttgttaaaggtgctattggtggttttagaaacttcttgttgaaaattaacgttctgagagttctaaaattcatattatcagttacgaaaatcttaaatacactattaaatacctcattccaccattttctcaacttgagtgcctcaggtatcactggctcacagataacttgtgttgagccttggacatccagtttcttcccttgccactctcccacctttactcctaacgtttcaatttgggtacacatttacttaccctttaaacagaccaacggatgcgagttttcgccttgatagttgaaaagctgcgttttctgaccccaactggtgacccacactgtagtatttgttgagtcacaaagtagaaagtccctcttctcaacgttgtttccagtagactaataaacatattagcgcgtttcactagaaacaatatcggcatatcagataactatgtactcaggtaccttgttgtttattttttgtacatccttggctgttaccactatggctataacatcaattgtttctccagatttgacatcctggagttggtcgagcggtgtaaatgaataacagaatgaaggtatagactcatcgttttggaacaactggatatgggagctctcatccaagatcaattcacacgtgtgtttcaaattattgaacctcttatttgcaggcttcagttgtcctccacttatggaataaacctaagaggattagttttaaaccaaattacctgtccttcctcaagaaatgagtaccacttgttcactgattctccaaagaacactgcgcggatctcgccctaaataccacataatcttcattcaactaacgttagaatcacacaaatctactgaaaataactgactttctcctctttggttattgaattttctgatttcagacctagttattaaacgatctttataatttatgaaacatacttgaaaactactcttgctcttattgaccattttggagtatacagggtcaaatctgatatttttgtcaacggaacatccttctttgtcttattcaccggcggatcatacgggttagagatcgtttttacagttctactgttttcctgttttctcaccggtcctgacactggcgaatttagttctggcattgtatttctaagcacaaatcggttaaaatttaaatttacttgatgttatcgtcctgaaccaccgccaagcgctatatcgtttattgatttaataatttaacaaatatttagacaattatctatatattctacttagttactggatgatagatcaaggcgggtacgaggtgaccaatcaaatgcctataatcccccggaactactgaaatcctagtcaaaacaaccaaatatcgtgatctaatttttaattattgttacaattgccttacttggtaggcgccactttatactgtgtaaaactgatgaccttccctattaattgtcgatctccgtcaggtgtgagaggaactagtgctaaacaggtgtgtttatattctacgggaacggatccgtcgagtgtttcaattctaaaattagattagtgattcacattggcaggttgcataaatttaaaaatggaagtctacaactacacacaaaacaaaatatatcataaattaggatatttttaaactaacaggtatttgttgtcagcaatacacgattgctgaagacagaggagttttacgggggtctgacattcgtgaacttcttggaagtatttttcgtttgcgttatttatggagtctgccagtgtggaaaaaaaatccctcgttaaaaaacgtggcagagacattttaaaatgtagaaacaaataagtgaagaaatatgtatattttaggcactacattatttacacaacatcaacctagaggaaggctagtacttgttagaaacgactcttttccaccacttgaaggaatcttcatttgtgaaattttcatttttagtttttggctcattaatagtatctttatcaaattgctcaatcagctccttttggttggcagatagaacttctggaagtttgagttcgaagtgtattatcaaatttccattatttctgctatcaacttttggcggacctttattcttcaaggttttaacaaaaaaaggctgagaatttggctgaagtgtaactgtggttgacccatctaaggttggaattgatatgttacctcccaagagacattgtttaagtgatattggaacgtgtacatgtatatcatcatcaatccacttaaatatatgatgcggttgtatgtttatattgacaaataagtgaccacttttaccacctctcactccaacgtggccttgatttgggattctcatttgcattccatttcttacacctggaggtaaatccacactgactgattttgtttgcgctctatctcctgagcctccacaggctttgcaagggtgaggtactacttgaccactgccgttacaggttctacatggtactcctattataattggtcctctttccattctttgaactcctaaatgtgtttaaattcgaaaatgaccatacctgttccattgcatactttacatacatctactgaagtccctggctgtcttcctaatccatggcattcattacatgaaactcttgctggaactgttatattctatgggaaattgagtttttaaatatcttaccttagtacaacctcgaatggcttccataaaactaattgttatttcagtctgaaatttaatttaaagacttgtttaatacctggatatcttctcctcttgaagaccccgtaaatgacgaacctgctccagttccagaggccattctagaaaacatctctgcgaaatccgtgaacatgaaagatgaatctccaaatccagaaaatccaccaaatcctcccgctataatttttattagaattttaatttacctgaaggatcgaatcctgggtcctctgtttgcattcccgtttgatcatagatttttctctttttaggatccgataataattcatatgcgctatacataatatataaatatttataacaaaccttgttatttgagccattttctgtttagcatccggagaagggttcagatctgggtggtattttttagccagttctctgaatttcctttttatttcttcgtttgtagcatttctgctaacaccaagtacagaataaggatcgtttgtatatctagttggagatgtatgtatatatttaatattccttttattgtaaaaaaaagattgtgtaggattatttctctggtctttaaaggagccagatgaaaaaacatatttatatttacatatcttatgccaagtattgtatgaacaaattgatttattacaggtttttctggaaattgttgatattgagtttgaaaagagtggattccacaatattctgctcatatttatggtacatttatcctacattattctaaaaaataaaatataatagttaattccaacataatgaatagtaaacacacgtttagtggtaaatataacccaacctagaccagccgacacaatattattatttcctttttatacccaatgttattcgacacattattgtttcattatctctttgtatatatatttcggatatttcatatttttaggatacggttctatcgatataccacccaattcgccttttataaatgcgaagtgtatccacaatgaaataattattattaatataatagccagtactactcccacagatattatgatttttttatttgttccaagttcaaaatccttcaaacatatacctttctttgtttttttatttaattcgttactttttgaaccaatgcttaatttttgtcttattgtttcgtatttactaaattttgagttcattgatccagatttcccgaatttattttttttcatatcaaaactttgtgacctactaagtttgaaagggttgttgctatatctcctatccatttttttaaatctttattatattatgtatgtttttataaaaaattctatgttataattgtttaataataaatatgtattttaaatattacttattttctatataaatgattaataattttgcgtgtcaaaagtctgtatttttgagacgcctctggatttaacaggatctaacgaaaaattctaattgtaattcacatatagatagtacagtagattacgttataaagataaaaatttattaaattatttcttttgttaaaatttaaaaattacacagtaaatccaagagacctcctatccacattacaataatatgcacctatgccgttatagttataatttgcgttaagcaacctcatgtaaccgctctccccccaatcttctccccaagaattccttactatccaatagtgaaccttaagatccggatcataaccatgacctactactacaactgaatgatttggtttcttggaacattcaccgtcaaatataccttctttgtaaaaggacatatctttcgctacatgtattgaaagttggaaaggaccaactttttccaaataatcctcaaccatttgtttgtggaggtaatatacaccttttatatttattttatttttgcaggtgttaggttgaatgcatcggcgatctgccattttgtaagggtattcttcttctgtgcacaatggataattattcaaataacttataacagccttaggatctcctcctttcgtacagttaaacattggatctatgcagtccattaattgttgcttgctataatcttgtagtttgtggccactgatcgccatcattgtagataataagtctgacattgagactgcccagcagctaccacactctttttgatcttggacgggcaaaattactcccttttctctccagtcaaatatcacaccaggatatttcttcgaggatgacatctcttcggaagcacggctatatatttcatcttgagtaggcttgtaacttatactggagacagctcttcccaattcttcatctgaagaatcagttgaacttgtatagcccattgtgaatattttattgtgatctataaaattttattttgttgataattaaaataaataaaatattataacatacttgagttgtgagtttctatgaaaatccgattatctctaaaattcaaatatctggtcttatactcatcttcatctttatattttttctcgtatctactaataaaacttttaaattcgcttattgtatctggttcaaacttttcatctaatactatgtttttatctaataaagctgtagctacaatctctatttcctttctagaaagattgccttgtatctttttattgtttttgcagtcttcaccaaaagtgggatcacaaacaaacggatcaatctgtgataataaaaatcccttttcctttaatttttgttcaagagttgtcaaatatttttccttcaattcatcgtaattctcacatacgttgtttttatttttggtacactctatttgtttgtcctcatgaaatttgggagcatcatatattcttttaacataagggccatttttaaatgttctaaattttccacgtggactaaacacaatagccatcacaacggcaaaccaaaaaagaagcaccaaaccaaaaaatataagactatagctcttaaatcttaacttgaattttttatctttgatatcattttcaagttcaaatgagttcccatgggaatatttctttacaaatacactattataaccgacttccatttatatctttattcaatattgataaagacgttataagggtacgacttaaattctatgtagaatccaatttacacaaaactgtgttatttaataaattatttcaataaaaaaattttaaaaattattaattatttatcgaggtaaaaaatcaagaatggctttgaccattcgtgtactgtaatatatgcgtgtgttcaattggtgtacttactgtacataaattattaattgaacaacctctgttccgaaatgggcttattagataagaataaatattaaattaacctctaaactaatataaatataaacataaagtagaaaacattcatattttacagtatggaagtattccacttatgatacagttagaactttaaaaatcaatcattccaatccaaaggaatgcataataaaactacaatatttgttgttatcaaacgaaggatctacagatttatctaatattctaaaatatcccttttctccccaagcttttccccaagagttttttactatccaatagtttacatttttaaccttatcgtagccatgacctactactacaactgagtgtgcttcttttcctccacagcttccatcaaatattccatctccgtacaataggaactcaattgacacatagaacaatgttaggaatggtcccttggtttttaggtgttctagaggattaccgttatagagactcactacttctttaacttctgaattttgttcacacttgtatgatgtgcaagagctttttttgaatatatatgggtattccttatctgtgcacattgggttttctttaatgtattgtaaacctgttctatggcttccacccttttgacaattatacttgggtgatacacaatctaccaattgttgataactgaacttcattggtttcttattctttattgacatgaatgaactaaacacatctgcactagcgattgcccagcaagaaccacatgggccctgattaataacatcatttacatatccgctctttctccaatcaacatgaatttcttgatcacccagatttaaacctgcttttgacattttggttgataaaacatcttctggaatttgttcattagataatgctgacatgtctccgtcagtatccgcgaagttggtaagggtcatattgtacaatctatcgggctctaaaataatcaattaacggagttcaaatgttttataaatattaattaaatatcttctaagactaactgttgttgtgatcctctattctttttctgtttagtctgaaattggtgtaactttccataaaagctttcttggttcggtagactttgaagtatttacgaagaaaatctctatgcattttaattgtttcaaactcatattccaagtctacaccagagctaccctctaatgcttcagcgatataattcagttcccactcataaatggaattagaacctaacaatgggcatttatataatctacattcttcataatttaatttcactactttaatacttttttcttttataaatttattgaaatcatcaattgttattttatcgtatacatgttttttcttctctttttctactttacccttgttctcggatatagcattttcatcattttcttcatgttcttcacctttgggagcaggctcaacaggatcaattttctttatatctggaaggggaccaggtacctctttctccttttcctcaagaagtttctcctctttcggaggcagtttatcatcttcacgttctttttcctttaaatctttaactggaagttcctcttcttttttatcgagatcattatcatcatgaacaactacaacttcttgttcatttctctttaattctggatcaggagaatgttccttgtcatctttatgctgttcatcaatgctaggtacaacattatgaataacgggttcaggtcttatttcttctgaatcaacaaaaggagtatcgggctttggttcaataatattatctgacggcctggagtgcttataaatgacataatacactccaaaacaagcgagacccaatatcagcaagacaactgtgaaaaatattgcaagacgaattctaaactttttttttttgttgagcaattcgtaatcgttgaatgtctgtttttcaacatctagggtatccatattacttggaatcacgatattttcgtattaaatcaaaatgtgtaagggatacgcgattatgttacagagagataatgtatcaatactgcgtttgaaggttatgataacaaatgttaaatattatacagaaatattaaaacttaaaaataggtaataaaaagataaaatttaataaagaattcaaattgtgaattatgtaatagtatatagcgtacttttctaatgtacttgaaatataaaaaaagtacacgatgcattatcccgtaccttcatcttcgaaaagacaaaacgggacacagcaaactgaaatatattaaaaataaaacctatagggacctgttatgttttatattgtgtttagttaaaaatgtattttaaaaaatcacatcacctggaatcccgacattgatgtgtaaacaaaaagaataaataaaatattataaataaacaaataaacagattatgtgttattttatattattaattatattaatgcgattatattttacaacataacaacttgttacactactttttaccctactaaaccgtaacttttgaatgtaaaatcacaatacttatttggcttatccggagatattgaaggtttatctaatattctaaaatatcccttttctccccaagcttttccccaagagttttttactatccaatagtttacatttttaaccttatcgtagccatgacctactactacaactgagtgtgcttcttttcctccacagcttccatcaaatattccatctccgtacaataggaactcaattgacacatagaacaatgttaggaatggtcccttggtttttaggtgttctagaggattaccgttatagagactcactacttctttaacttctgaattttgttcacacttgtatgatgtgcaagagctttttttgaatatatatgggtattccttatctgtgcacattgggttttctttaatgtattgtaaacctgttctatggcttccacccttttgacaattatacttgggtgatacacaatctaccaattgttgataactgaacttcattggtttcttattctttattgacatgaatgaactaaacacatctgcactagcgattgcccagcaagaaccacatgggccctgattaataacatcatttacatatccgctctttctccaatcaacatgaatttcttgatcacccagatttaaacctgcttttgacattttggttgataaaacatcttctggaatttgttcattagataatgctgacatgtctccgtcagtatccgcgaagttggtaagggtcatattgtacaatctatcgggctctaaaataatcaattaacggagttcaaatgttttataaatattaattaaatatcttctaagactaactgttgttgtgatcctctattctttttctgtttagtctgaaattggtgtaactttccataaaagctttcttggttcggtagactttgaagtatttacgaagaaaatctctatgcattttaattgtttcaaactcatattccaagtctacaccagagctaccctctaatgcttcagcgatataattcagttcccactcataaatggaattagaacctaacaatggacaaccattttcaccacaggttttgtgttttttattttctatttttatatcatttttaattgcatagtatttcatttttttatatattagacttttatttaatttacccaattcgttcgggtccaaatattttacatactgagaatttaccttctccattaacttattatacagatattttttcaagtaaaaaaagtaaaaaagagtaaatgatacagacaatagtaagatagttatagttgagaataacaatattttcaagaataattttcttcttttagtggaattagtatcaacatcgttgaatgtctgtttttcaacatctagggtatccatattacttggaatcacgatattttcgtattaaatcaaaatgtgtaagggacacgcgattatgttacagagagataatgtatcaatactgcgtttgaaggttatgataacaaatgttaaatattatacagaaatattaaaacttaaaaataggtaataaaaagataaaatttaataaagaattcaaattgtgaattatgtaatagtatatagcgtacttttctaatgtacttgaaatataaaaaaagtacacgatgcattatcccgtaccttcatcttcgaaaagacaaaacgggacacagcaaactgaaatatattaaaaataaaacctatagggacctgttatgttttatattgtgtttagttaaaaatgtattttaaaaaatcacatcacctggaatcccgacattgatgtgtaaacaaaaacaatgaataaatgaatacattatatattactttatatttctaattatgtctattttattatattctttttaattatatgaatttcctgtattatattttatatcatttacaatgcgttatttcaatttgaaaactaagagtatttttatattatccattacttatatttttaataggtttccttgctgtattcctttttttattatttttttccgtagtatcatctaaaccttggatttatttttggtactttgtttaatttacatattgtttaggggacttttaacagctttgtgtttattgttatttttagttgatttattatttatttcttctgattctatcgttttcgacccattttataggtttgttgctcttatattaatttatgtttcagcaactgggagactaatatgaattcagccaaatactagaattatttaaatgattaaatctaatatgtaaatttgtatatatgacatttaatggtttgttatacgaagcatatgtcctgacgaactggtacaaacagtttgtaggactttaatgctatatttaaatccctttttcccattctatactgttcctgcttctgagacataattatttgcttcttttcagacttctttctaaatttgaacttatcttgtttattcttaagggcaaatgggttgtgtaccacaagattttgtttgtaaacgtaagaaagttcccgatgaacagcctcctttccattcggtagactcaaatttccattttccataatgtaagcttttttaaatccataactagatagtaaattttcaacgcttgtgggagaattggtgctggaaaaaatatcctcccagtcctcatcttgaccctcttgagtcttatatgatgaagagccatcagaacttgaagatttcttcgaatcaacaataaggttgacgtaagaatcaatgaaatcgtagaaactactgatttcgtcaaaacggtcatcgttaatcttgtgatgctgcttatcaaccatgtgatgaagagttgcgtaatgatccagaaaaggcttatcacaatacaggcatttgttttcatgatatattttgttgtgtaaataccttaaaagaccttctaagtctgaaatatactccttttctgggaggaagaacgtatagtgtttctccatatacctgacgttgtcattaatggacttactaacaacatcgttaaataggcatttgttttgattaaaaattttcgattttaaagatacttctgagttccttaaactactactacccgaatcagatttcaaatccaatgattttgagtttgaactaccatttctcgttgtgttctttatacttttagttgaaatcatttcctgaatctgattctttaataataaaaattcctcttcagttatggtaggtagttgtgagttttttctcttgatgttatataaatgccattcggatttaaaatgtgatttttgcgaagaagtatcaaaaaatgtaacattacaagtcgaacattttttaacctcctcttctttaacttgaagtactggaggctttggcttgacaaacaacaaatttggtgttcccatcatatacaaattggcaaatattgcatttgagtattattaaaataaatttataaattgaaaaatattttattaaaaataaaattaattaaaatgtataaaatgtaaaaatatcaaagatattagaaaaattttactttatgtggtagctcgattcctgacgtttgtgcatccatataacattggcttgtttgtacattatatgaacttttatcttataaaactggctatattatttaaattgtgttcctctttcattcgaacgggacaattatttaaaaggggttatattcctatatttcggaatcactttaacacatcagattccttgtccaaggtttgttaaaatttctatttagaattattttttgttagaattctcctgaagaatacgcctcatttaagggtaataatgtaataattgatgattctaacatctcaaactacgagacatccattgatgaccttctcgacaccagtaagttttaaaacatattgtgtaatatcttgcaaaatagagttacttggattcgacttggagtatgctccagactactattctaacttgaattactcctacaagaggtgtaaaccatccatagtacaaatttgtggagattctacttgtttcatttatctaatatataaaatcggatatgttcctaaatctctgtgtaaaattttaaataataatgaaatagtaaaggtgagtttatgattttatttatattacaggtatcgcacggggcgccttctgacatgcgccttctgtttaaacattatggtactatgtgtagtaattttgtcgatttaaaggatctctgcaaagactataacatatatcctgcaagcttgaaaaacgccaccgcatcagttctaaacttaaaattgagcaagaaacagcagtgctctaactgggaggctgagaaacttgttcctgctcaaatatcttacgcctcaactgatgcttgggtgactagagagattttcttaaaactcagtcccactaaaataaacaagatttttttgaatagcgaaggcgatatagaaacacaacctccaagcatgtaaaatataacttgggatggtaaacttaaatttaatgaaaatagattccgtacttacacatcttgtttatttttattttaacctgttaattattctcctttcgtgatccttaactaactttttaaaatatttcctaaaaatatatgatacaaagtgtctacaaggtaccttctgtccactgtcgacgacaggtatgaccttcgaattaagttcctaactttattaaaatgtgctgtgaaccttttgtatttcattactggagtagaaatcggaaggtttacttcattgagtgactcgacaacgaaaccatttctggttaaattcactgaactgtaaggcactccattatcctttagatacttgataagcatttttctagatttaaacatcttgaatttgggatcatatattaaatactgcctcatgttagtgtccttgaacttgtgtatcatgtaaagcaatgatgcaagcagactaaaaaaatgataaaaaaacatagctaccttttcttgtcgaagttctctaaacttttaattgtagtgtcagttgtactcaattcttttggtaatttttcattgtcttcaccaggtagtaaggtttctgttttattaacttcttcgttaattttaactggcccattatcagaagaacaatcgtttgcgatgtcatttgctccagtgaaaatctcctctaaaaactgtgtttaaaattattaaatacccagttgatttatgaatgactcaactacagtctctgtcgagggaagggtccaatctttaattacagactttagatagttgtggagttgtgccatgaataatttatctgttcttccatagaaaaacaggttagatttagttgctgacaatctctttgcaaaaacgtccaaggttccaggaaggtcatagtgaattatcatatcaactttgggaatcttggcaaatacgttatctgaaagtaaaactatattagagcctcttctaaattcgagataaaatatttgacaaaatacctgaaccatcttttaaattggcttatatgtgctttatttttaggaaatctttgtattctagatgaattattttaaaatcttgttttttaaaacgtacatttttgaggatatgataatttcatttgctctataaccatttgcgtatacacacaccttataattaggccacttattaaatatttgggttatacttctattcaatagctctaatttcaaagaatctttcggaacgaagattccatagttgataatatctatgaagagaagaattattatttatatatttaaagcgtactagaatttcttatattcccgtcagaatctaaataaattatgtttacattacacaatattattatgaataccgatagaattttgaacagtgagtttgctatagtctgttctaatctcattaaaggtcttactgggactaaaaaacccaatttttgttttaaatctattattatataatcttgaaaaacatattctatttgtttttaataaatacataataaatattatttttgcagtcgacacatcccgatttatctatgggtcaacaactcactttttttatttaattaatatgtaaatataaattatgtttaaagcacagttatttcaagctgctttgtctattacgaattatctacagaactcctttttggaggaacctcgtaatgattcgactaatcaaaatgaatatcataaaaaagaaaaggaagtcaattataacaatccgcccaatttattaaagtctctttttgactatggaagaccgtattttaggttagattactctcaggcattaaacaacatccgttgtttggttttacccattggaaaagtgaaacatttgactcctgatctgtatatccctagtatttctacttcaacttttatgatcgcatcttctatattgttatgtattaaatctaaaggtaaaatgacctttggagacgctttatccaaaactctcacaaaatttgtacttgtaaatttattcgaaatattatttctcggctctctcctttatttcatgtcacattcaaacgtatctgatactaacgatactagtaaacaacaggttgactatcaacaaaatcaagaagcaattaatcaagcatacggacactttgcaggctatggtaacacttatcagaaccaatttaacgctcaaaatgcgggaaactttcaaagttatggcaaaacagataacacaaaccaagggaacacgaccatggtccagaaaacgaaggttaagtttcccgatgtgttgtttgttataggatataaatatgttttaataaattatttcttgtttatcaccaatttgataccattaaagattaataaaatagtgtcaatggtatatgctgggatttcatctcttattttttcaattagatcaattaaatcgctgagaatctttcaggggagtcgctcaaatccctttattttcattttccctgtttttcagcctctatttttttatattttattaccaactaataaaatttaatatatttataaaatttatatgcgatattagctcaaatctatgttttgtcgaaatgcgatagaaggaccagagagtctccacggacaaaaattgtaccattgtctcttttagtaacctagaatgttttgtaataaaaaaaatttaccttagtggtttcattttttgaattattatctaattcaacggttgtaattgtttctgtaacttctgaaagtaccatgttacaatgctcatcaaaagcctgaaaataaatttaaaaataagaatttttatatgatcttacttgcaatctaccaactaactctcttccatttttacatttcaaatatataacctcgtcaagatttaatcggatcatatcaaggggctctaagaaaaagttgataaaagaataaataaagagtaaataccctgcaaagtaaccggaggatccatgctaaagaaaaatttacaccaaagtcataaaattataaactggttgtatcacgttaagtagaatcatattcttcaactccccataaaaaacaatcaaattacatatattaactattcatatttttgttcattatcttaataaatatggagcattccgagcactttacttcaaaaaccttaaaagaaatcgaaggtatcactaaaagtccgttggtgaacttcaaatattccaaattcaaacagaaaagcaatagatccggtacgatttttttatttttatgcacatttctctatagatgaaagtgacgtttattgccctattgatgatgataatctttcaccaaaaactaaagcaataatcccggatcacattaattcatcgttagtgtttttattttttaaaaattaatctttattttagatttgatatgttatgcgaaacggcaaaatattttggaaataataaccatctgggtgtaagagaaaagatcactcttcccgatggaaaatgtgaattcggaaattacgttttcaacacatacaatgatagcgttaagtacgcaaaaataatcggtacagctctgaccaaggaaaatctgattccagagtcaacaatagataactgtagatttgtaaaaaaagccaggtttttgggaatttggtcaatgaattgcccttactggcttttgaccgactacgcctgctgtggatacggttttgttagcgttccaatatatgaaacgctgggagacgacgccctgttcaagattattaaaacaactaaaatggaagtcgcctgcatagattcgaaaaagatatcaaacttggaacacctcttctctgaatttaagcagctgaaaaaagtcattgtattcgatcaactcactgaagatgacaaaaggagactagaaaagttgggtctcgagtactatttaatggacgatttaattgaaaaatacaaatgcagttttgtcgatcctccaccaactaaaagaacggatgtctgtacaattatctatacctctggcacttcaggaacacctaagggtgctgtgttcagtaatgaagccctcatcatactaaccgagaggctcctgaatgttcaaaatcgttgtagattaactttcaagtcctgtattcttagttttcttcccctgtcccacgtttaccagcgcttcatagagcacttcattggatcaattgttggccgtatagggtattactcaggaaacatcaaaaatatacttgatgacctaaacaaactatctcctaactttctggtcggagtacccagagtcttcaccagaatactcaccagagtattattttttcagattatttaatacatattttttaattatttaattatttttacagttactcatttttaaaaaatttaattttttttaacctgttaataaaaaatttagatacgagatcaaattgactcgaagccttacctggtcagaaagatcattggcttctttgttaaaggaaagaagagagtgttcaagaagagaccgcacaaaccaaatcacttcttctatgacttggtgatcaaaaagatcaagtcgaagtttggagggaagttcgaaatcatggtcctgggcagcgcttctatgactgacgacgatgtgtgtgatattcaggcttttatgggcactcctctggcagaaggttggggaacaacggagctgggagtctccatcctgcaagactatagggacaccaaaaagggcacaatcggtggaccactgcacggagttgaattcaagcttcgctcaattgaggagctcggatacgacgccagaggcagtcctccgagaggtgaactcttggtaagggcacgaggaatcatgctcggttatttcgcggatgaaaatctcaccaatgaagtcctggacgatgaaggttggtacagaacaggtgacgttgttgaattgatgcccaatttgggactcaaaatactcgatcgagcacgtaattttttcaaaatgtcacaggtaaatttgcgttttatttattttttaaataatttttaataaattagttatttactatttaaatccatataatttcattcattttaatcaatctaatcttatgttcagggtgaatatattgcaccggataaacttgaaaatgcctacgtcaatgcaaagttggttgatcaggtatttgtgcacggagaaccaaccgagaatcacttggttggaatcgtcgtggtttcgaaagaaaatgtggaactgtgggcccaagccaatggactcgcaggtaagacagtacgtgagcttttgactaacgagaaactcaagaccagaataatggaagatttcgagaagattgccaaatctcagaactttaactcactcgaacgacttaaagtcttcacactcgtcgaccagccattttcagttgaagatggaatgctaaccccgacctttaaatctgtcaggtataagattaaagccagatacaacgctgaaatcaaacaaatgtacaatgatgtaaagcaaaccaacaactcaagttaaaattgcttccttaatctgatgcagtctattatattttcatattaataatttatattagtatcattttgataattatttctaatgttaatagtttgtttccctatttatatcactatgaattaatgatttcaccaattctactaggactcaaacttaatacacaataagataggtaaagaataaattagaaacgagttagtcgtaaattaaaaactagagttagttaagtgaacaacaagcatatctaggagttcactcttatacaaaccattaaatcctttaattattttaactagcctttcagaagttaccgaaacactctttaatgattttgaaagaaaaggctcaaggtttaagttacaaatgactgttttattctgaccgaaaggaagggagtctgaggcttccgcaaaggcaaacaagtaaagtacgaaacacaaacagttcttcaaaaaagaattatctgcagttacaaatgacgatatagttttgaagaattggtcatcagagttggcggtgtccaagaacttaccagaattttcaagaccgtaaaagggattacttccttcaacaagagtgaaataggtgttatttgggataaggttggatttattgagcaccatgtagtccaaaaacaaggttaaatctgagttattatacaacaaatgaactaaatttatgagaatgctcttgttcctaaggttagatttgacttccgtgattttcccgtttatcaggcagtcgtagaccatgatatcctgatcatcagaagttgtaaaaaagggaacatactcttcgtccttctcaacaacctcctcagtgccaacattcaagtttttatctatcaacaacctgaatatgtgtccttcgcagttaaccacgtttattcgagccagattatcgtgggcctgaaagaaatattaaatttacaaattaccataaatgtgggttccaaagaatatgaaaaaattggcaagttgccgcaaattacatccctggtaatgttttctgagatgaagtgaaccaaaaagtgagcctgccaaaaccctgtgataacacggtgctcatcacttccaaacagacagaagaacttcagacattcaacaggaaggtttgaactaaaaatatcaagaggtttctcaataccctcaaacttaggagttgaacgattgtcaagtaaatcacgggagaatttaaggttaacttttttcagactttggggctctgaataatacacatcaattttaaagtcatttacaggtagggcgacaaatgaagcacacgagattaccttaatagcacaaattacactgcagaacagaggatttgaagactgagttatcttggaaaaaaacgggaggaggtccttacatttagtgaggtcaaaatcattcaggtcgtaatagtccttgttgagtgggttaactcctgaaagtccaagtacattttgacccttctttggcttcttctttacaggttcttcatcctcgtaaatgtcctcgaaatcttggaagttgattcttctgccttccctagcacttcttcttcccctcgtttcctcttttaaagggggtttctcctcaaaaggaggagttttagagatccaaataatcaacaagtactcggaaaggttcaatatgcacagaaatccatcatttttaaaagaagatgcagttaagaactggcatgaagagaatccaaaagtggataagttaaacaaaacccttgactttgaatactccttatcagattcacagttaaaaacacaaaaatctgattttgaaagaaaggtttttatagcgctcgagacgtctaacaggttctaaaataattaagtgttgtaattaaattacctcaaggttatacatttcactaccagaatccatttctgatggcagccaaaggttaattgagttatttattgttatggtaaagagtatacaaacttcagttgtatcattaattttgaattttggagtccaacaggcccaaacaaatctgtaaatattagatatttaaaggtcaactcactttggactgtctgacacagagtaggtacacatcaccctctgaaaaaataattaaatttgaattgttaaaatttataagaatacctgtaaatcacaatagtaggtggagctattctcattattaagagcttgattctgagcaatgttggaatccctcggaatggaggaggaagttgctttagaagtcaatttaaaattattataatcatatttaaatgtgtatatcttatcgacaacagacaagcagatctgattatcagcggaagttgatattaagcagcgcttagagatactgtgcaaatttgagaatatttgagaatcttccagacggaaaagaacaagcattacgtagatgaagacaaatataatacattacattattatctaagtcttgagaggaagaaatccttgagtgagttaaccctacttactgactgagtacgttttttcttcttttcaggttcttgaatttctttattcccatcttctgaaaacatgttaatttgtgtaaaatacctttggttttgataggtgtaggcttatactggggattttgggggtcctttctcttcctcggcgaaggcttaacttctttagacccgttaccaatttcactgtttattgtctttacgtttttattcgtatcacctttaggtgtctttctgggcgttttaggcttgggcggtgttaaaaacagctttcctgggcttgcctttattttagagttgttgaacagaagaagaggcttcttgctcttcttctcatataattcctccactttgagatgagtttgtagatttattaccacaactttcatcacatctgttggtaaactaactttgaagttatataattcctgcaccaattttgaccctatctctcccagtctcctatacgtttgatcaaatgggttctgcgtcaatcccagatgctccaccacgtgtttgaattctttattattcatcttatttgctacgtatattgctaagttattcatctgtacaaaagccagcgactcgttacctacaagtttaaacaagttatacacgtccttaaccctcttcattatctttgactgttttaggatttcatccaaatcctcatctttctgacctgatgatctttttggcgtcttaatacctgagtcagccaaggaattttggtcatttttgtccttcaaatcattttctttaaactccgttaactggtcagatttaggcatgggtgttccggaggcgggatcatcttcaagtctagaaactgacgagttatctgctgtactagtattagacgacgacgaactcgatgtctcatcgttttcttccctcatgttagcttctaaacaattttattagttataaatttaccttgaaaatttaattcatatgcatcctttttatccaaatcgactgaaacttgactatctttcatagtttctaagagtagattttcaaattgtacaatggactcataatcattttttactaactcatcgacttttggaacttgttttgtggttggttggctcaatcccatgtattcatagtggtcatctctggctgagtctaggctaatttctatcagtgacttcctctgtactggttccttcacctctttagaactttgtgatgctttaacaaatgtagcttctctgtgttctttcaacagctttctaatgattccgattgattttgacaatgttttggaagattctgaaagttgagaaattaagttctcggactttttaggctttagtgactgcaacttggttgtaagcttggattttaacttattcgattgttcagctagaagcttttcattatttgcaacaacgagagcgaacctaataaatattatttaatatgaaaatccttaccattcacagtgtatttcaaatggtgaatatgcgttagtcatcgcagttacagacttgacaatccagcgtaggattttcccattcacatcgattatcctatattgaagcatgcagttcaggcctcttttcttaagaatctcctttggtatctcatttgggtttgttttgggtttggagaccgctttatcctcttctactgttccttgttgattttcatctggcaatggctgagtttggctaaggttctcctcattaggaacttcattattcaattttaactccttctcaggcttattcttcttagatttcgatgaatattttggtgtttttgggagaattttcagcttaagtaatcttttgaatatagactctaacaactcttttactttaactctcaataatttgtctgtgatcggttcggctgtatattccatttgactttcaaattcagaatatatgttatggaacctttttggtatcttagaaatgtaatctctccatcctgacggatagaagtagagtttatattcactctccatttccttctgttgtttgatatccttctgaaaactactatagtagtctgccacaaaatcctccggttcaacatattcttcctcatcttcttcatcttcactccagtctgaaaactctttttccattgctcttttgagtagtatgtcgcttttactcattttcaactctgacagcattgcgctgtcatcaaagaatgggtcatccatatcgtagtgcatatcatctcctcccttcttcaggtaacttgttggatctcccactatcccttgaatgttcaatcggtccgttattgaccttatgcatctgagtaatgggtcgtttggtctatttttgagccatataacatcatctaagttctcatcataatttactgttttctggacttcagaacctgagataacttgcttattatcaaagttgggctgcgtttgagagtcgtttggagtttctccagtcccttttgatacctttggaagatcgggatagaaatcctctactttccctttcatattttccaaatatgactcttcgtatatgaagtttttttcatctccgtatttcttaaggcattctgagtagaaatccactatcattggtattgcgatttttcttccctttctctccaaaaaattagtcttcaggttcacgtccacgaatatacctgttacacattagtacgaaatctatatttataaatcaccagtacctggtaggtatctttggacggaaggttccctgtaattgtcttctacatctgataagtcctgttccaccaagtcttcctcttctttcagaggttttccgttggatttgtgttttggaactggggtgtttgataaattttctttaattttattgtctggatttccggattccaagacattagttttatagtttttgctaggtgtttcattattattagaatttgcagttaaatctgcgttattctgtagattgttcatttaaaatacaattaaaacatattgggtattgagaacataaaattatgaaaaactaaaaaaaatatatattgaagttctttgacataaaggtgaactgacttttaacaaaaagtcatcaattatataattagtttctttacagatcccatgtagtctaggtggttaggatattcggctttcacccgaacgacccgggttcgagtcccggcgtgggaacttattttagattgttttaaataatttattaaacattatttataattcgttatttataattaacagttttataatcgatataattaattatcacaagctttggggactacaatttttgaaaaattataaaaacagattatacacgatataaatatttatagtaaaattatgaacaaaaaatcacaataaattaatttatataaaaatgtgctattctttgatgcgataaaacaggatataactggcgtcgttccccgaggtggtttcatccccgatttcagagtggtagtcatcgagttttaggatggaagcatcgtcacatctaaaccaatttcctccgagttcggaaatgtttatatagtgtccgtaatcgggagatgtcccaatgtgtgagataattgagaatagttcgtagacgatgggacatggatgccgtttacagtttacctgaattacgttagagcacactactgagtatggaagtctttcatacactgaacacagtgagcttcccggtttggtggtatatttaaacctctttaagtgtaaaattaataagggaggcatgaggtcaaagacgattctctttgacgcgtcacaatacttatcacacttctcacaaaagaactggtttttaccagagagaagttcatcatcgcaatagcgttgcaaacaaaggtttatatcacagttatcgaaaatattgagtgagagggttatgaaaggttctgtcataccagtaacgctatagcattcatgacatcttgtttcggattttacacatccttccaccaattcatttaaccacgttttcttctcaagttttcttttcccgccacttttagagctcataaatgttttaggtttaacatactcgtcttctaagtttctgatttcatctatcatagcgttaagtatataagtcaaaaattcatgtgcatcctgctggtctccgagtataaaatcatctaaataattgtataacatctgtatacttaccctttgtactacacacttttttcaaaaatcctttagtagactgaatatctaaaacaaaattattgaattttaaaataccagactgagtaacacatttactatataatttagccagctccgatgagattgcgccctaaaaataaccattaaaagttaaaaatacccccgtttttttcatttttatcattctatttctaaattcgtgatatgaatatagggattgtatcactacgttagaataacaattattcaaattgttttctaatccactgaatttgacaccctcatcacatatagctttcttattgccatctttggaaagaattaaacaattcttcaacatatacattatatttctattttctacgttagaactttcatttgatggcgacgatgatctggacgaaacttctgagtgtttggaggagccactatcagtaaaaaatcccattatatatagttataatacaaataatttgattcatttaaattattagtatacaaatcatgaaaatactcttatataattattgacactatgtttttagttaaatttaattcccacaattgtgtatgccgagttattttgtaatttttgactccgctatgacacattttgaaaattcgtcttgatttaatttttagagatacatttatttatgtttttacgaaaattcaggttaagttctgtactttcagatgtcgattccaaaatacactctctttcttctaaaacatccgaacttggcttgaatttatttttaaacaaattaaaggaagatcataacctattttcaccaaatgagaccgttttggcctgtaattaccttgataaaatcttgaatgaagttaataaatccagtttctcacacagtgaactatcgcaaattaaaaaatctctgataaatatcttccgttccaagttatacttactttccgacccaaaccaactatgtacagcaacaattttaatttctaatggcggaatattgacggaatcctacgttggagattttctgactaggcttgacaggctgttatgttccattaatttcgaggacattccagtcatttctgactgttttattaccctttacgatagaggtaccattaattttattactaattaatttaggatataaaattgacaacacatgtataaaattctacaacgttttagcttcagataacactctagagagcattgacaactccttcttactgaaagtttttgaatgttacgctagtttaaacatttataataaattattagagaataaattaggtaagctccactagatttaatgagctttagtttctgaaattaaagatcgcgtgaatgagaacaaagtcccaggagcccaaattgttaactttattaaatcaaacagccctgataagtctaagttaaactttttaaaccaattcctcttatccaaactactaaatgtccctattgcttgtgaatataattacttaagcaattaataaattattttttattaaaaattcgtttaggacaatgacattgatttgagtactctagtaacagtcttaaataattgtaaacgtttgaatagagattttgaaaaagtcgaccaaatctacctctcatatagagacgaattgagtttatctaatgaaaagagtagcttgcagttgaaactggacctattaaacagttttgctagatttagatataaacctcaatacgtgaatgatttactggatgatatttccaaccgtgcccaggaactgagttttgaaaaccttattatcctcttcaagaacattttcgacttaaatttacccaacgacttgataatagagtcctttaaaacaaccttaaacaaccttaaaagtaatttttacctaacctattaatcatattttatataattaaatccatttacaacatgccttagatttggaatataacaatgttttcaccaaactacttttggcaatgtcatacttttctattaatgaacacaatctctttaacaatatactctatgaggtaatttgaatctgatttcataattctcagataatacgcaatgaacataagctgactgaccaggacaaaatcaacctccagagattttactcaattttaaagtacttttttaaattatttctaaatatttatatatcattatctgcttactacattggtttaacaggtctgactactctggcgataaccttataagtgtaataaatgaagacattgtgaagtatctgcacaacaacgcgaataattgttaccaagtccctagtagcagggaccttgattacatttcaaacttgattactcacctatcccatggaatatacgaacaggctaacattgcgggatattacctcaatcttattatccccaagcacatgaaaagcagagtaaaatctggtcattttaacactcaagaaggtatactttcccactaattagtctctttaggtatcggtataattatcactcaattttacaaatcacctaccggtttggaatctgttgaggagactagtgagcatatattaatgagagccatattaaaaaagttaaatatcaattttgttgagatttccatgcacacccttgagggtctgaaccgaagtcaacgcctcgagtacctgggagggctaatatccaaggcatctgaatcttatttatgtaatcatttcaattaattttttaattcagtaatgtagtctaattttaattcatttcttattgcatcattgctttatcagttgctaatctagttagtcctcgaagtatcgtcgttcgttaaatcgtattcgccagccaggtcttcttcttcctctagctgtgaatcgtaggcctttaattcatccacatactgatcatttttttgtgtgaagaggtgcgtatgggagaaataatttggatgtactctaagtctgtatatattctcgggatcttcatcggtctgggtggctatcagtttggaatccacaaacgaaagtctgtagattatatgttgcagtttcaagttccattcattggcttcttcttctgtttttggcatcagtatgttttccaagtaccactcaatgagctcattgttcaagatcaagttccctgttagttcatgttccccaactttgtctagaagcacactgattattgcgttgtatttgtccaagccgatgctcactgtcatgttatcgaaggacttcccggcttcttggtcagcctcggcaccttcttctccacttgttcttgtagtatcggcttgagatgatcttgaggtatccttaagaccagtagtgagttgaattgtggttttgttagtcaacttcagtaatgaggacttgaagatatcataggctatctggacatgatgcgaggtgacgaaatcagagaatttaagctttgcaacagcctcactaagtctcactagggattccagctgcctcacagtcattctcagtgagcgctttcccagctgaacatctccattacgcagttccacatagtattcactcagtttcctctttgcgctatcctgcattagcggcttcagcctcttgcaaagctcaatataaagtctcagttcatcaaggttcatctcatgttcagtttcagaatccaaagtgtccctagcctgggttgttgttgtggtgtttgcgttagttttattaactggagcggtcatacttgattgagtgtatcttctgttagggttaatgtactttacgcttgtgtattcgtcccactttgataagttgtagtaggtggatgcatccatgtctgcagctgagaatgcggttgcaccctctccttcatgggacattgacatgctatccagaagcattgtatcacttgagttctggttaactatatcaggatttaagttaagtgagttgaaatattccgggtctgtgatcaggggtgaagattcagctgtgtatttgttatatcgttcacatacatactctgaaatcctcctattgacctggttgttgttttcatccaggattgtgtacaggaggtcaaacctggataaaagcggggatgggatattaacgttatccttgaaacttttactagtgtcataacgaccatatcttgggttacaagctgctaggaccgaggctcttgcgttcagtgttgcctggatacctgccttacttatactgatggtctgctgctccattgcttcatggatggccaccctatctctctcgttcattttatcaaactcgtcaatgcagcaaattccttcatctgcatacattagggctcctgcttcaaggacatagtcgttgttatcatggtccttgaacactgctgcagttaaacctgctgccgtggacccctttccactggtgtaaactgctcttggcgcgaagctttccacaaatttaaggaactggctcttagcagtcgatggatctcccacaatacacatgtttatatcaccacgaagcttagcatccctagaactcttgtgtactcctcctaccaatagaagaagtaggccctttttaatctcgtaattaccccagacattaggggctattattttgcttagtctgtcaattgtatccctgctgctactcacttcacggatccattcgaatccagagatattcagcaggtcttctgctctcaagaacttttcgtcaacctcacccacttggaatgtgtttctaaactgatttaccactgtgacttgggttgccagaaaacttaatttgtgatttaactgtttaactccgacgcctctaataccagtgataccttgggacaacaaaaacgtctcaaatctctttgcaccttgcctcattactttctttgccacttctcccaattgtgtggcgtttaacatcgagggtatatctggtaccacaatcagtgaccctgagatttggactctatctcctgcatttacgctatcaacaagtttgttcctcataatcacgtcaatgctgcacggcattgatcctgtttcggcttcttgcgctacttcttgtattctaatcttttgccagtcacaaaagtgtgatcggtccatcattagctcccagtcactgctgttcaggcaagctgtggttggacacttagttggagtggtgtatttgaattgttggacaacatccgtgacaactgtcccacagttcttacagcgaaatgtcgctctaatgagttcaggtctaacatctgaaactctcgtcacttgtcctctgatgcaaattaattctcccagcataaagcacttgacttccctcaacctaaatcatcattatagtcgttaaaacaatcttatatctattttagcttacgggtaaatcaaagttggggtgtgcaaaaactgtaaatagaacttccttgggactctgttcactgcattagagatctcattaactaagttctgtaacacgtcttccaatggttcttgcattctaatccagtattagtttttataaacacaattttaatgtgaaaattttattttatttaaaaatacctcaaaaaattcttcaccaagtatctgtaaagttgaacgttcaagtttacaggcgcatctatattcacgtgcctccaacccatgacgtggtttaaatgaacgggtaggacttcgcttgagctagactccttgaccacaagtttgtagatacgcttcatgtagtataactcatgggtggaatctgtggaagaaaggaacatttcattcaatgcgtcgtcatcgtcgtcgtccatatcatcttcatccaattcagtagtccccgtgtgtacataagatcgcaaaaagtaatcgaacacacgcgatatattattatcttggatattcgctgcatcttcgtcgtcattgaagtgtatgttgttaagtgaaacagtatgttgaatctgacttaaactttggagagtatttaggccatgacttaatccgtcttgagtaaattctccatccatttttacaattaataaaatattattagatcaagttgatgttgtctatgcggttaaaatcaaataattaaaagttacatattccagcaagtgtacaccttttatttaaaaataaaatatagacaaatgacattatatgtcagtaatagaaatgatctaaacgaaatgtgtaaagaatcaacgacactccacaaaaaatctaccacataaaggaaatcctagatattcaaggggaaaagattgaaaatttaaaccagaaatattatttaaaaatattattttggtacaaggaatgataatctagtttaacattatgtgagtaaggttgacacaccacttgttaccgcacaccattgaaaacggagtgtatttattggcgtctatcttactgtaagattccgcatctaaataaaatattaatattttttatcttcaaattacctgcgaagaggaacaccaacatacggtttacgtatgttcttttcttcattgtctcgtttggatctgagatgtgaataatgggaaattcctcatgaaaatctccaatccatttaacacattgaatgtcacttcctagaactggatcatcatttttgccacatcccaccgcgagctcttctgtaaaaatttaaaaactcccatgtacaacttacttaaaatttgtatcctagtattttcgtctttccaaagattttttgccctgtcgtgaacatatgtgttatagatctttgccaagtaaaccacttcttccgaattcctcggtccatttgtcttcccagactcatcatttgataaatcatcagggtttcgtggctaaataatattatattatattaaaattaccgataaagcttcgtcatctgtctcagattcaacttcctcatccgactttttttgattttcttcctctgtttcatctaggccaaaaaacgccgcaaatggagttcctgagcaggctttgcacctgaacattttattcattattttttgcgatgtgtaaattcatatagatgattgatgattttgcgaatttagactttaaagtctagatgtaaactaatattggcgttgttcaataggtactctcaatttctttaatatttagtgttaattaaaaaaatgtgtaatggtctataaacttaatttattttttgtaaaattttagaccccattcgagtgaaccataaactggtggtaataatacaacatcggattggtaatattatattaaggatacaattacaatttaaaaaattaatgtataacatttattatgaattaaaataatttcccacgccgggactcgaacccgggtcgttcgggtgagagccgaatatcctaaccatctagactacatgggatacatttcatttatttatttacctttatgatagtttactatacaaggttcacacgtgattattatgttattaacatataatttatatttgcataaaaataatttattatgtacattattttcatttctgtcatttgcgtggtcttaaaaaattcatattgtgttaattattacgccggatttacctttaattattccgacatcgactcccatgtgccaatactcggttctttctacaataagttatatttcttttattccaacaccttggtgaataatggagaaaagaaatttgactacacataccaccaattggacaatatacactccggattgtcattgtttactgattctgtgtatgatttagataagattcctggtagtacaaagaataaacacttgctaggaaccttggaatcatggtgttacacattaacattattcttattctatcccaagttttcaaacgacatcgcatacaaggatggtaatgtatataatcacctgtttgacaggtgtatgaatttaaacagcaattttacaaattataggaaggatttcgatttcgtagagtttttaaataatacagacactaaacttgatgacatttatttattcgagaagttctctcgaatgtgccctaggccgtgttacttggataaagataagctgggaaattgtaaccctagttcaaaattttctgaccttgagctgctaaatgagtttgtttcaaacccgaaatgttatattaacgattttttatcctacgaatgtattccatactctttccttaagaggaaaacggtaaactcatttaagtctctgttgaacccagactctaatattcacgtttattcaaacaagtattcttatttgtacatgccaaagagagatgagctccagctttcaatggatgacttatcgtatcaaatgtttctgaaacttgtgagaaactgtaacaccaaaaactgtattgaaatcaaggatcttttcactacaatgacactaaaaaattttatggtaaagtttctggttggagaaattgacttgaattctaaaaatcctaatgaaaagttcaaaatttcatttggtttaacattctacgtagacgaatttagatctaagaatgttaaccacgtctttgattttctcatcaaaaatgtcgattttgacgttctttatgatgttcttctgggaccacaacctttacaagtgaataatgaagaaaatgaaaagccccccgaggaaaagcccaaatcattcaaggaaagatataataaatacatacacgataaacttaacaaaaaagtaatagagacaaaacctaaaccaccaatctcagattttttctctaataaatttgaatttctgaacatgactggctacggccaacacagagaagttaccttctcaatggaactgaacactgaacttttgaaaaggttaaagccaattaattcaaagtactactttaaactcacacacatgcttgatacaagtgtttacatagacaatgatgaacttcacggattatttaaccttcttaaagatgaagttgacgcacttgacctacccactaatcatgttttggaggaaaacggagttggtaaagttgttttaaaggcccttaagactccattcattgatattgagcagcctgagatgaactcatcccctgtaatttataacgggtacgtcgttctggacgaatctgttttgaatttaaggaggcttaccattactcttaccctaaacttacacacgagatacatgcatatgataaaggccacaacccccgaactgtttaaagttgacaattttaggattctaaggaaccaaataggcacagattactcattatccataatttcccagcccaaactatacattttgaatccctttaccccctttgagaatgtgtctctccatagatcctatttaaggtacctgagattcctaagggatatatcgttcacaaggttttccagctctgacaatggaaataaagagaatggattaaatcagcctgagaacacttgggttccagtttttttcacccagtgtaataacgttggagtctctgctaaactatgccaaggatacagaacaggtctggcaatttcaacgaaggttataaacacattcttttgcaatcctataataagggagataggaggagatgtcattgactcaagctgttacatgtttttttcagttccagttgggaatcaaaatgaataccccttcataaaaaacgtgactctcttcaccttgctggtatcctgcataggatctctgatcatggtactgaggtacatagatgaaactcttaaaaatgcagaatatacgactaaataaggcgcagtttaaagaataaacttgtatagatacatttacattatattatttattcgtatccgtaccctagtatatcgttaggacttttataaaggacggtgtgatgcaaagcaacgcaaataccaagtgtataaataaccgatagagctgaaccgagagcaagagccctttgaaaccaacgatacctacgagactctctacttagtcttctattaatgaaaaagaatataaaacctgaaaatcgttaaaagttaatttaataaatacctaaaggaggaaaaaggaatgttaggaagaatactaaaagaggcaactcaatttgttgttcaaataaacgtcttttcttagattcctagaatcaaacatgaatcataaaaacaaattacctcatcttcttcctcttcttcatcaaaaactccgtcaggatctgttttaggagcgttttctaatttggactctctacttaaacgctttctttcaactaactcggaatccatgttatagaacagtatatttatatgaaattaggattataaattttaaataaaaatacaattatgttacaatatataaaaatgatatacataaacagaaaactaaaacaagtcaactggttttggaatactggggtgtgatttgatgtcgaatttttattcattaaagcttttttatactttaaattagtttaaaatttttgttttaatataccatttgtaatgatatattttttataattttataactgcaaatcataatgtaatattgccttctgaatatttgtaataatttaaatttgcaattgaaagttcctagatttatcaatttttgtactatgaaactccttctgatgactaggacactgttgtgttaaagttaataatgtgtaaaataggtaaataggaaaatcgaaatggatgagtcaccatcgcatacatcccaaaccaagagttcacctcacccgaaaaaattcaaagaacatgtcagaaccattggagcagagtttagagatactgaaggaccgatacgcaggttaataatccataaagtggtgttgaacaacttcaagagttatggcggtgttacaaccatagggccattccacaaaagattcacctcaattgtgggcccaaatgggtccgggaagagtaacgtgatagacgcgatgctatttgtgtttggatttagagctaaacagatcagatttgacaagttgtcggaactgatccacaactcaaagtactacctcaataaaaataacggaaagcctttacaatctatgaaagtctcaatacactttatagaaattctagattacgatcctgatattgatgattatgaagttatagaggggagtgaaatggttatttctagagaagttttttctgacaatacatccaaatatagattaaacgggactgtttgcactcaaaaacagatatccaacgcgttgaaaagttttgggatggatttgtacaataataggtttttgatattacagggagaagtcgagcagatttctcaaatgaagccgaaggcaactaagccagacgaggaagggttacttgaatatttagaggatattatcggaaccaaccagtacctggaacaaatcaaccaagccctggaaaaatatgaagagttgcaggaacagtaccagatttatttcaacagaacaatggttacacagaatgaaatacaggatatgcttcccggtaaggaagaagctgaagaatatttatcaaaagaaaatttgtaccataaatataactatttgttaactaaacatgagttgatggatgtgcaaacagatatggatgcagttaccgatgagcttaatacaattaaaggagagttaaagtcccacaatgaaggtatttccacagtggtggaacagaaaaatgaaatcacaaaaaacctgaaaaaattggaggtcgagataaacaagtttagtgctaaacaccgagaatacggagaagagttcaaaaagctgtgtaacaaagacgaggatttaagaatgcaattgctgcatgaagttaaaaaagtggaggagaagactaaactgattaaaacactaacagccaagataccagaactagaaaaacagtcaaaaaataaattagaagaatccgatgagctgaagaagaagataccgaatcttgagcaagaattggaaaaggcagagaaagagtttgatgaaataaggaaatctttggcctcggaaagtgaaaaattaatgcaaaacctgcaattccacgaaaagaacctggcaccagttcaggaaaaatacgatgaggtaaaaaatgagcttgggtcaatagaaactaatttacagctaattgagaaaacacttggagaggaggagaaccgtaaactgacactagaaacagacctaaatagcactaaaataacaatccaggcaaacaaagataaccttaaaagcatatctgataagataaacgattgtggccaaaagacgcagagactaatgaaagaacttgcaacgctggagaacaaaatctcagaaactaactctaacctaattcacactaaagtatcctatgaaagtaaacgcaacgaggcaggtcagaacaagttccataactcaattcatgattttgtaaaaaaattatcaaaaaccgacaggggaatttatggtcaattcggcgatttggtgacagttgaggataagtttgagaaatcatttcttgccatttgtggcgcttttttagagtattttgtggttgagaccccagaagttgcaaccaagatattcactcaactcagacaaaataacctcggaaaggtatcctgcatagcattgtcagttatttcaagtcattcaaacgcagactcaggtcaacaatgcggaaaatacgggtttctgaacaaatatgtgttcccaaactcaaaagatgaaaattatgaaaagatcgtcaaggtcataaactattacactagagatgttttagtggttgaaaacctagacgaggcagacgaggtttcaagaaaaacgaataagagagtggtaacaattgaaggggaagttatagaaaaagatggccgtataacagggggaggtctcgagagaaatttaaaaaagttcaaacaaagcaaaaaaagtaacattatactttagttatcattttaactagtgaaatgtcatatttatcaactaataattaaattaggctctagttcagataagagtgaagacattaacaccatatacaataagatggagtcatacgagagggaattaaaggatcttaaagagaggcagtcagggctctcaatagagaaggacaagaacgaccttcatctaagagaattaaacttcacactagacgctacaaaaagaaagattaactcagatgagagttacttgaaggatttagaagcttctctttcgtcactcaagagtagtattcagaaccaggatagtcaaaatcagataaaagagctcaggaaaaagctacaagaaacacagaatagaaaagactcaacccatgaggaactagtaaaaaagaagactgaagtggataagtgcctgaaggagttagaaaatgtaggaggaggttcacttgcggcttccaaggcaaaagttgcagtctgcgaatcaaacttgtcaaaactcagaaaacaaattgaagattatagagaacaatatgcgattttggccggggagtctcaaaagtattcaagggatttaacgaggcttgattctgatattcaacagcacaaaaccagagaaaaaaacctcgaaacccaacttgaccagcttgaggaagaagcttccaagatcaatgaatgcctgattgaagtaaacaataagctaaatgacctaaagtctagtcacaacgagcttactgagtctatgaagcaaatgaccaaccagattaaagagcacgatatgctagtgattgatctgaagcataagcaggagaagtgtgaaaagtccctatccttgttgaagaacacacaaaagcagaagaatgacaagatgagtgagtctaaaaaactcttttataactcactaaaatctttaaaaaccagcaccaaatccactgaattgtatattagcacaatgaaattggacactttgtccatacacagtaatagggggtcgaaaacgggagatgatctagttcccacagactcaaatttaaaccaagaaaatgatttaaataaccacatctcaccagaatatgcaaatttaaaccattctgaatcctcaaatctgaatgaatctactgagttaaatggtacaactgaattaaatgggctaaatgaactaaatggcactactgagctaaacttagtaaatagtgcaaacgaattaaatagtacagctgaattaaacggatcaaataattcaactgacctatatcaactaaataattcagactatttaaatggagtaaatggaattaatggcacttctgaaggtaaggatttggtgaagaaagagaaggtggatgatatagacgacttagttgaagatgttagcgggcttaataaaaagatacaatcattgaaagcccaactaaacacagtgcctaatttatcagtaatcgactcgtttgttgaaaaggtgaaggagttttcaaataggaaaaaaaatctgctggacctccagaaccagagagatgaagctaagctgttgcatgaaaacttgtcctttaaaagaaagtctgagttcctgttcaactttgaaatcatagcaaataagttaaaggaaatataccaggtattataacataaatattagcttatttacgcaaaactatccactatttatacattaacctaaaaagtgtttttactttaccctaaatcaataaatatttaatgaattatattagatgattacactcggaggcgatgcggaattggagctggtggatgctacagaaccatttacagaaggagtgctgttctcagtaagaccagtaaagaaaagttggaaacaaatttataatttatcaggttagttttatatatatcttaggtcacccagtgttctctctatattcatcttacattttaacaggaggtgagaaaaccctaagttcactggctctggtgtttgcgcttcatcactacaaaccgaacccggtgtattttatggatgagatagatgcagctctggacttcagaaacgtctcaatcatagcacagagcattaaggagaggacgaaagacgcccagttcatcatcatctcgcttagaaaccaaatgtttgaaatgtgtaacaaaatggtgggaatttacaagaccttcgacgttaccaagtccatagcgattaacccacaggcactaaataatcagtattctgaagaaaacccacaaccataaattttcattttgacgttttaatatattattttaatattttaaaaatttcaaataactattttttatatttgatcgagttacaatgaagatcatttattaacaccagaattctaaaatgatggacttgtttgcagaggatgaggcggaagatacagaactaaaaaatcagaatgatacaaatcaatttttaaagtacgaattcgatcctatccccctggacgccgccagagattccgtggacatcaccagcatagaagctctggaggaacttgcagaattgaacccaaacctgattcttccgcatcttctgcctctaaatgaaaaattatctgtatgtttaaattcatctttccaaatatatacatatataagtgttaacatatattcttattcaggctccgcgcgaaacaaccagtgatatattcaataaagagtgagtttctagcttattttttaaacacactctattctaattactttataatacaaaaattttctagagggatacaacttatgcacattcaaatgcctagcactcttccagcgataaatagagaactagaaattggcggtaagttaaaattaacggttaaaattgaattagacattgaagataaaacagataaaaaggtttatgaaccatctaaactggaattcttgccttcagggcagctgggaaagctgagaattcataaaagtggaaagataatgttacacattgatggacacgaatttaatttcctaagaggaaacggatctacctgtaatcaacaagttgcctgtcatttggagcaaaataacgagtttcttttcttggggaatttccacaacagatttgtggtctccccaaatctgtcctgcctcggcgcaaatcaacacacatagatctgtaaaattaatatattaaaccctttttactattagttatgaacatgtggaaaacattccataattttcatgtttatgaggataactagatgaagagttggaagtcaaaacgattccaaagatgaaaattgaatagtttagattatgttaaaaataggagtataattaaatctataaaaaaacaaactaagtggataaaataaaataaaaatgatcggaatgtgtaaagaatttcagaattatgtatgaataaagagcgaggaatatgaagactagggtatacacccaaggtaccaaactgggcagaaccatggaagactacataaagatcacaaatgaattatttttaggaggataagaagggccctaaaggagatctcgcagatgattcaatagtgcaatggtgcttgttcagtcggtggggttatatatttaagaagctcataatacatatacacttttgtttgttaatcaattattatgtattatactattggttcaactagccaatgtgcagttataggaagtcaatcttataaacaccgatccgattcataacctcattgactatttggtaagcctttatttaatgttgtatttttttgccaaaattttattaattaaccactcataatattcttatgtcatttctctatcaagaatacgttattttttttattgttcctattttttaattttattctcactgttgtgtactttacgattatctcactggtattttttctcgaggcttcctcgatctccgcttttttgttttttgccaatgtaatcatttaacctctcaaatcttactgttttctctgttttttatctgcattcatgtttgctccctttattatgtctaatttacttctgaaacccctttaacaattatttttagatgttcgcttttctataattgatttcaaaacgcctctccatgttattatcgttctttcacatatttttaatagtgagtataacttcggcatcttattacaccgatacagtttgattttaaccatttaattgcattttaaacatactccggaacattttaattccagattccggagcggttcatgttttcttaaattcgagagattttaattgtaagtgttattttattaagataacgacacatgactgataagagtaaatcagcaaccgtaaagggagaatcaactcccgccaaaacgtctcgaccaacgctcttcaacctgctcgaggtcttggcaaactattcaatgacaacgccatcacaaagacaatgcatcagagatattgtaaccgagtttctagcgaataaatttgagcactcgaaggtgtattcatacatcggagctgttgttggacatgacagactacatgccgtgatcaagcaactggaagctgatccagatcgatcacccttaccagatcaggacgggctgatgaagatcgagtcagcctttaatttaaccagaaattataagacgacaggcgcaaacggggattcgtgtacaaataaggatgaaatcttgagaacaatacggagaaatttgagtaaaaagtgcgagttgtcgaggtcgtcgagcgtaaaaacagcatctgcaggagttttgttgcagaaggcgtgctggctacccattagaagaactttgactgcaggcccgctttatggccacagcctaatttgcataggcaacagagcctacattctgggcggaagcaatggcagaaaccaaggatttaacctttcaaaggcacatttgataaaccttctcgacttcagcagcaagcagataatgttaagtggagaagtcccaacacacagggaaggaaactcgtgtaatgtggcagtggttaaccagggccactccgtagttttgtttggaggctttaatggcgaggttttctttaatgacgtgtacctattggacctggaaaagcgcagatggactaagagacacccaacaggaccacttcccacaccaagagatgaacattctgccctcatatacccaccaagatgtgatttaaaaaacccaaacacgacgacagagagggtaacaccagaagcaggcacaagtgaaagagtaatgactgaaggccaaaatgcacaagcaaattcctcatcagaaacatttaacaacagccagttggaccaccaggataaggatgctcaggaaaatagatcaacccagagaagtgtgaagagtgtaagggaaggacctgtggtatacctgtttgtgtttggagggaaaaccggcctcctaaacaagttcaagtgcctgaatgatatgtgggcatacaacgtactcggcaattactggatgatggtggatacgggagagaataaaccgtgccccaggttcggagtatgtgcgctttgggccgacgacgagaccgtatgtgtatttggaggagaaacgagctcgtctaacggctttgtagatcgcactgagcgagttctgctcgatgatttatggatgttccaccttaaccccctaagcacaggcaagcaattatcaagcacgaacacccagttgtccaccgagtcagcatcggaaacagcggaagactctcagttggataacacagacagatcggatcgcaatggtgaggtgaaattatcaggagtctgggtgcaggactactacgaaggaaacataggcccgcgctcccactacagtagtatatttatagcacagaggtgcaaagaagttaacacgggagcacccaggacggtggagaggttgatgtttttgactgggggtttgacttatccacctgggaataagaaggtcgtggtggcaagtgacaagctttacttttatttcttcagccaaaagaggtggtactctttgaagcccaattatccaaggaattacataggggagccatttgagccaagacagcttcatgtggcctgtttcttcgagaagaagaatattctctttccaggcacaaagccctcggtgccctgcatattcttccacggaggctttcacaagaagcagatcctctcggactcttgggtgctatccctaacaggggaggatcttttcttcaaaaattcattactctccacagagaccaacaacaatgcaaaaatggagcttaggatgtacccgccctggtactacagagagtcacactcaccgtctctgctctggggaatgtgttcagtacagaagtgggtgtttggagcacttgcacaccttgttgacaactcactcaaggatacagtaagtagcacaaatctgtccataaagttcgagccatcacccaagggcgaggagctcatgctttccgtccaggatgacgggaacggacttgactacaactctatgaacaggctcttaaagctctttggcaggacttacaacagctacaactcgactgatgatccagattccagaacaggcaaggaggagtatggtttgggcttcaagctcgcatacggaagactgggaaacagtgttgcagtaatgtcgagaacccatgactcgattggcattggaatgttatcgctggatctcatgtgccagtgtgagtcccgagaaatggccgccccaatgtgcatgtggaagcttccaagcaaggagttgattaacagggacggcccatgtcttatagatcagaggcatcaccagagattactgatgagctactccccatttaacagtgcagcacttcttgcggagcagattaacgtactaggagttaacccaggaaccaggctactcttctggcagctgagagacgacttagactctctggtcttggaggacggaacactttttagttcaaaccacacccataaccttggaagcagaaacgcccagagcgatgacgagtctaaggatcaccgtgaagttggcagtgtcgtttactttagagaccatgttatggagggagggattgtaatggactcgaacaaccccaatggaactaaatctaaacacgacggcgccagttcaccggcaccagaacagtcagtaccagaagaacagctaaataatgcagtttctggggaacaacataatgaggcgcatgaaaatgccgttgatggagctgtgaaggttgaaggtcaaggtaatgaggaaaagcctgctgtagagaatgagaatcaggaaactgcagtcattgataagctagaggagctgaagagcttgatgggatatagcggaagctggtatgaagcattcccactatggaagactgcaaagcattcaatggattattgtctcccagtgtacctgtactggctccacctacactcttcctgcacactctcggtacaagatgttcagcttaaaccaaacccagttcacttccacctgtttgaaagtaataaatcggtggatctggacgacatagacctgtcaacgcgagttgagtcactggcccagtttactcaaaacacgacaaacgccgttgatactagccagaataaccttgacaagagtcagagcggagagaatttcaaacgtgtacgcgagccatttagcagtgcccaagaggaggaggatgcagttaattacaaggtgaccaagtacaataactcagttgatgttaagccaggagaaacagataactctcagccagaaaaattgacaccacaaaagaaggtaccagaatgtcttggaacaatggcgatgccaaatccacaacttaaggaccaatttggaaaagacctatcagttgaagagtgtttcctagacatgcataaccacgttttgggaacaaacatgttaggtgggattaacaacgcatccgatttatcaatggactcttacagctgtggaaagaatacatgtggatactgcggagtttcaccaataggcagatctctatcaggaggcgagactctctactcctttctaagggccaaacttcataaatctgtccaactcccatttctatttcacccagaagatcacgcacaaggcgcgttcgcacttattgggtttttgaactatcccacaaagtccgcataccactcctcgtcaagcgagttcagctttgacaaaacctctaactccagtgtttcatcaaacttcggaaatctaagctccccagtgaagaaaccactagctccaacctcatttgtagtcacagagcccccagaaccccaacccacaccacctccagtctcctcaagtccaaccaagtcaaggaaagccaaaggacagcgcggaaagggcacaacacaagcacagacgggaaacacagcgcaacaggctcctctacccaagacaacacaggttattttcagcggaagcatgtcctctgaaaacctgggaccgacttcaacccccgagatggaggcccagaaaaaagaatcgaagtccaaatcaggccctccgatgtttttgggtgttggcgctggagcacctctgtattcgtctgagaggtcctcatctaacatgtttttgggccaacagatccccagaatgcagcctgaagatagagtatgtgaggctggagtgctactgtactacaaaggaaggatgattaggagacttgaaggcaacttcccggcgccgatggatgagctggagagtgcgaagctcccgccaaaagcaagtcttttcagaggaaacatgtacagatttgcccttacagccgtgattaatgtgcccaactggctagtcccttcaataactaagcaggagtttgtacacgagaataaccgagtctttctgaccttcaaggccaaactcatcaagttgctctcggaatactgcaaagtgtgcatggatgagcacaagaggcacagctggtacctggaaaagctcaaacagatcgtcgactacgatatggccaaccagacgactttgaacagttacatgactaagccggatgaggttgagggcctggatgacgaagttgtgccctcctggaagcttgaaaacaccgagtccagtcaggagaacaccacccgtgaggagtctttaaacgaagacgctgtcgttgcacccccagaagacgacgtcaatttgtcctccaagaacctgaatttaaataatgtcgctaccgtaacaacttgattttttctcgccttaaccatttttaaaccaataatattatcagactctataaattatttgtactttatatgatacatgtattgtgtgtatatgttgtgtatggtatactgtgtatactatactccatacactatacatatacatatacgcatacgcatatgtatatacacatgggtatattaggtatgtagattattacaccattatttaataagattgtatgcgtatttgttaaatcttatggactttagaagattaaactaataatttttataatttaagaattataagaacttttatagaggcgagagatacacggaaagagtatacaaaaaataaaataaataaaaattacataataagcactaatacatggtataattggtagtaaatacaagtaaatagagtaggaactagtttaggtgtgaaatttcctcagatttacacagggatggttcagaatgaaaactaggtaaaaaaactaaatgtgtaagttgaaatggactctagaaggttgaataaaattaattaaaaaagtggaaggcagcaatggtgaggaaacctgtaggaaatggaatatgaagatggaaggtgtaagtgggaaagtacagagtaccagttgagttcaaaaaaataaaatttaacaattaaggtaggattttaaagggggaatcatgcacaagattcctccctacacattgcatcaaaagtgcaacctatgcagaatcacaggagggtaaggaaagggacaaaatttataaaataaatttatcgtaccacttctttaaaaaatcggacatgtagaagtaaactaaatatcaaaggaagtccgaaaaaaagaatcgcaattgtgagaatgtcctcagtagtgttaaacgatgaggaactcaggtgcttccgcactaaaatatgcaataatttggttaagggaaggtgtaatttcaaggaatctaggtgtattttcagccacaacacgatatgtactagaagatgccctctatacctgtcaaacacctcgttcatccggtacatcccgctgttctgctctcacgtagtcttcacccagaatttcaaaaccgtaaaatccaattgtcccttcggaaatgagtgtatttattctcattcacttgatgaaattttatatcatcctcagttctataaaaccattacttgtgaacattatctaaagggggtttgtaaacacattttctgccccttcgttcatgaagattctgagagaagacaaattaagcattataaactccccttcacaaataacttgtatattcctccaaataaatacatcactgtagtggatactataaatcagaggtcaggctcgaagaagaagagcgactcagacagttccaccacccacagcacaggtcaatctcctgggttagtgcctgagaacaggacggtgagtgatgcggaattacaggccgatcttaacatcttgaggggaatgtgtactgagagtggaatgccctacgacttcaaagactatgacgactatcaccaaactaggagggtttcaaactattctagtaggctaagttccattgatcaacttctatctcaattaaccacaacacttgacgagtctttcatgaccaaggagatgttatacgagtcgataaagggacttctggatactcccagggttccaggtggatgacttaggtggataattgatgtggtccatatataaattttagaggaagtaagagataatatttaacgataatacattaaccgtattgatttaacagaattttcctaaaattgttaattaaggtttataagcttacaaaaactctggcgttgcaaagatttgacggccaccggagattggcattttggggaaaacatccgtaaagaagtaatagatgtgaccgacgaagatacccaagagattttcattaagtaaataatctgccatgtaggacaatatagccaaaatcctaaatttaatatacaaacattatactctaattaaataaagataggttatgtaggtaattatacttaattaatcatagatatctagttaatagatatcggaatagttaaaaaagtaaaaatattgtaaatgattaccatggtagataaggggctggaaccgatagaaatattatacccactcgactatatggatttttccttccccaaatatatgttaaaatattaatcattgttcctccatagaacatactgtgcccaaatatttgagccaaagcctaattcactttaaggacaaattagcttaccaataacattgctccattgcaaatcagcatccacaggaaatctgcaggcttgttatgcatcgtaacactttccaatgagctgcagtagtggatcctaaaattcataattaagtaaaaatcttacaaaacgtatatattccagaaaaatatcattccaaacgacccgaagtatacaaaacatgtaattaaacgccaaacttcaccttgaaagaccaacgtccagctcatatatagatttaatgggctaataatgtccaaggaacacaatatcatcagaaagactgacgtggagaggtatattcgggtcatgaacggtataggacctataagagagtccattttattgcgttagaaatgtttcaattaaaattattaaaattcagggatttttattctacattaaactatacaaatacaaagatgatatgaatctgtttggacccatatcgaatacagatttataggatatgaaaatttaaaatctttctaaatatttatttaggaaattaaaagatgtgtatgttcataataaaatattttttcttatcgacgacaccacaccgtgaatagttccattcatcacaattgtacttttcagattaatataatatttctctgataaatactataattatataaaaatcactgtactatatgtttttaaaatctaattcccttattttcgttccaaatactcctcaagaatagttctttcttcttgatattcttattattacaccttcttaacttattttcacctttaattagactatttaattcatatataccagttttttctacatttattgattaaatgtctattataactatttatctaatcgttctattcatgaatttacacatggattgattaatgtactagttccaaaaatataatctatgttcttattttaaacatgaatattggcttaaaaacactgtctttttataataactttcaatggtatatgttagaatagcagttacattgctgattcaaagtgattttccaagtcaatctgaatcttttcaacatttctaaatatgttttaacaggaaataataattatttttggaataatatggataatatatcacttcattgtctactattattattaatattgagtaaactagcgcattcaggtacattgatgagtttaaataattatttagcttttgtggacaggaacagggttaagtatttcagtcagtccagattaaggggtatttacatgcaattaattaacctcccttagctttaagaactggaaagaaatcactggaattaaactgttctggactcgcaattaatcttctgagtgtccaggagacttgtaatggcaatgtaatctcctccacctccaaattcttggatgaatgtgacaataaaccttattgcaccttgaacttcggatgcgaggatgggattattaattcaacagtccactacacttgtagaggtaaatgactacacaaatccttcactattatactttaacattacgaatatttaatccattcaataatcgtatatagggcttgatccggtggatataaccgacaaatcacgtatgtttcaataaatactcacttctttcagtaagtagtgctttctttcgcgacaactcactagcttctcttcgttgcggtgacaatagatatgtttttatttcttctgccttttacattcatgacttctctgaatacccaagcgagaacgacaccatcactgacgatgttaagaatgagtgtgactacggtggagcttgtagttttattccaaaattactcccgggaattaagaaagtcttcaaagactcttatgtttacgtaactttcctttgcattttgggtttgttttttattttaactttctttagataagcttgcttgttctactttctactgcgaggataactctacttgtgttatcgatgggcctcttcctcctaaatgtgtttgcaataaggggtatattatgaaaaacggccattgcgtcaaagattattccgtcaaacctatccctattggtcagagaccttcttggggcccttggcgaggcgggattcctgatcctctgggtaagctaaataatttaccttctgatgacactaaattgaaaatacctcattccaaatctggttttaactacaacgtaataaataaatttcaacctcaaccacgcaaaaacgccaactcagactctgaaaccaacaataaggatactgaatctgaaaacaccggggaaggtcattctgacgatacagagccggatgatcaagatgagcttaatgataaagatgaggagactgaaccgaaatccaacactactgaatctgataatgaagaggaaactaatgatgcagagtccgacaatgagcctgaaaacataagggaacctgagactaatgatacagaaacaaacgatgaacctggcaacgtcggggaccctgaaactaatgttgatgatgaatcaaaatcggattcagaaaccgatgcagaatctgaatctgaatcagaatatgaaactggcgatgaaggatcgaatgttggcggcacagaccaaagcgaaaatgagcaagacggtgccgttgagtccaatggcgcagaaggggagactgacggtattggagataacaggaatacagaagatgtaggaggaactagggatggtaaattccattttcatggtaatctagctatgcaaccggacttcataagaaagggctgttttcttaacactgacaggtaactaagaaagaaaaatatatgcaattaggataattgtttttgaaatatcatgcaaaaataaaacctgtgaatacaaatataaggagtgttacaacattagcaattgatgcttacttacgaaaatgcaaatcgaaagattacatatattcggcaatctacacagtaattatacgttaattacatgagcatagtgtaataattgagtattggcgaaaacttacatctgcaggcatttcttcaatctgtgtattgtagtagttttcaatacttttcatagtgtccatatcctggtgggtaacaaagttgattgctacacccttccttccaaaccttccagaacggccaattctacgacaatattatactcggattatatatatttatttttaagtgagtatgagattcatacctgtggatgtagttatctggtgacattggtaaatcgtagttgataacgagagaaacttgctgaacgtcaatacctcttgcgaggaggtcagttgtaatgagcacacgggttgatcctgatctgaattcacgcataatgaggtctctctccttctgacccatgtctccgtgcatgcttgaaactgtgaaatctttttcttgcattttcagggtcaggtagtccactttcctccttgtgttgcagtaaatgattgcttgtgtaatggtgactgattcatagagatcgcatagtgtttcaaacttgtactccttgtcaatgaggatgtagaactgcttgataccctcaagtgtcaactcatccttcttgacaagaatgcgttttggtgacctcatgaactttgtagtcaattctagtatttcgttgggcattgtggcactgaaaagtgcgacttggatatctggtggaagtctcttgaatactaaacattaattagtgaatggaattatttgatataattatagttaaatagctaaaataacatctggatgtgacgaaccatcttggatttggcccttaaagccacgtgacaacatttcatctgcctcatcaaggataaacaacttcatcttgtcggtcaagagtgccttcttttcaatcatatcgtagacccttccgggtgttccaacgaccatgtgtacacctgccttgagcttgtgtacgtcatcacgaaccactgttccacctacacaagcgtggcactgaactttgaggtagtcacccaacgccaaaacaacctatatgcacttgtgagtgaatcacgactaaccttttggatttgctgagccagctctcttgttggagccaatattaaaatttgacatgacataacatcgtaattaataatctggagagctgctatactaaaagttgcggtttttcctgtaccagattgggcctgaccgatagtatcgtaattttcgattattggcttaatgccacgttgttgaattgctgagggtctttcaaacccataggaataaatacccctcaataagtcttcgttcaacttgagagcatcgaacgaatccacaacttcatcatagtttgattccatggtgaaatttccgtttgagtacgaagactggtttgttgaatctgagtctgccattttttaatcgtgggtatttgaaaaatggaaaaaaaatttagtctagaattatatcttttgaagattccgctatctaaaatcttagatctgaagactattcttagttccaaaaaagatatgcacacaaattagaacaatgatattgtaagaaaaaaatatttataaacgaatagtaatcgaatacacttaggtttattaattttatatacacaacccccacgaacatgcatcataaaagtactgccaacctgagatatacacattcattccttactcttctttttagatctctgattattttttcaagtaaataaatcttcaagatttcggtttttattattcacttagtgtaaaaattaaatactttttttttatttttattctttatctttttgcatctatttcttgtccctcgcccattaacttccactcagactgtcactatactcaggaattttttctttatttattattcgatttatttattccaagatcctttttttaactgcacatttttatccttttcagacagcctaactattgttttattacacatttaattatttaaattattgtttaattcttgatttttcaattatattttattttctaaatatcatttttagtgatttacaccatatttagttatttttcttttcattcaccttattcttcctgatttattcactacccttttggattcctgccattatataaccgtttatcacaaaaaattgtattttagtttatatttcacaatttaaacaagattccatcaattttttgagtttttataaaagtttttagaatgttggagttgactgttaacaccaactcccaggaatcccaaatatcaaagcttctttggaagtatttaaatctgaatcacgcaacacttttatttacaacagataatgatacggtaatgattaaaattaaaatttatctcaactatatccaggaatcagccttgaagtttaaggatggaagagaaacagtgaagcattttccactcatactggaacttgttctgacaacatcagataccggatcactccttataccgaacgaacctgaattgaaggtatttttgacctattaacattgttaagggcactatggactcgtttgttgattttgcttttaaacacaactttgatgttctggatgtcgagtcaattagggtattatcatattgaactatgaatttcagatgttggatacgtatttgctaaatgaaactttctttgctggtccttccttaaccttggctgatgtcgtattatttgtttctgtattaaattggacggtatgtcatttccacctaattgttatttaggttcgttctaaaccaaaggaacgttcagaatttcctaatctcatgaggtggtttgatcatttacagcatcttccaggttagtattcacttttcttttcaatttacacttgtttcttagagcttgcggcttgttttgaggagttttcagtaataaacctgttcgatgtatgtgttttcaattttaatttttttttagaacaagcttgttatatcacagccaaaggcgggtattaaggtgtactttttaaattttttagagaaagttgaaaagaagaaagaaaagaaagagaaaccgaaaatccaagcaccaccagccgagactagaccttatgatgatgtgacaagattaaacgttagttttttacccatataaattttgaaggttgttgttggcagtgttctatcaatcaggaaacatcaggatgctgacaagtaacaaattttatatttcaacaactttagattatactgcctcaaagttgatatcggaactgaggtcaggagtatttgttcaggacttgttgactttcttggcccagatgatattctgaacaagaaagtatgcatccttgcaaatttacctaaaaagaacctgagaggagaagaatctaacggaatggttttatgtgtatcaaacgaaggcaaaagttctgttgagctcctggagccacccgaggaaacacctgtataactctatacatactcactgctaatgtttaactaatgattgctaggtgggagaacgtgttagttgggaaggtttatcaggagagccagacgaacaactttcactgaagaagggaaaggatacttttgctatggtacaaaaggtaattttaagagtttgtaacaaattctcaggatttggtgtgtaaagataacgttggatactacaaggtaaatataaccctgaataaaagctttagtcgtcaaaattcatgacttccaaggggccatgtttctgtaaaaaaatctcaacgggaacaatttcctaataaatgtacacatttaaataaataggcaactaagtgaaaaataatattaaatgcgagtaattttaagaggatataatacagtggtaaaggaagtacaaaggcaattttgcgatgtgtaagattggttaaaactgcatttggtgacatctggggtttcatcaggtgaattgtttacactaacaccatcttcatcatcagaacagatggttgcgacaaactggttggaatgggttgttattctacacgttggaacctcgtttttaataaaatctgataatttctcgtagcccaagtcgcgatacttgaggtcaacaccgtggacacgtttgtacactagtggtagagaactaagaggtattatggattcgatgttaaaaaggctcagcacctctgttcttatcttggaaagttgttcttgatccaatctgttagttgcgttgttgttgaatttgtttgccgctgacttagaggtcactacggggaccaggcaatttcccctatagaccaacaagcccatttcgttcaatttctgaacaacttttacgattgttcccaatgataaattcctaaactcctttgggccgttcttcttcaagtgctcggcaaacacgtacctgcctccaacgttgaatatgtcttcaactgggacgattgagatgtcgagttcaaataatttggtataggcatcaatgattctgcactcgaaattcatatcgtggagttgtttgttctcactttgctcagacaacatgtaatactggtacgttgatatgaaagtcaggtaatcggaggccactttcacaagatcctggtccacaaccttgttgaagtgcttaaaaggtctgcttctgatcaaaatagcccattcgtttgggatgtccctggagttaggacctggaccttgaagccttatgatttggaacttctggtcattagagcatagttttagcagtttctggccgtttatgcaggatccttcgtttttgttcagcttacgcctgatctcatgaacagttggaacgatttcctcttcatatagctcattgatggccttgtaaatgctatctaactttgtaaacgatttaccaggctttttattctttgagctcttgtttttctgatatccgttccctgagatatctctcaagcgagtggaattattgagatttgaagtgtaagctgtactaaaacttgaaaaacttcctccgtcactgctgcaacttgacccagattcatgctggtaatcctcagtttggtccagtttatttttaatcatgttagattccaacccagattcttttactaaattattttctttcatttcacaggaacggttaattttttacagtacgctttggttattttccatgtttgaaagatttcaggtacctgttggagtcaaagagaaagaactttttgctacttttcttcgatttgactgacgatcataaataaaatttctttagactccatacgctgtactgttctaactctttgaactcaagaatcatgtctctttagccttccatcaaataccctttgtaaagcctatttgaaagagttatcaagtccagttaagctttaaatcgtttttaaaattctaaattttatcaaacagctcataatctagtcaaaggattgtcttttatgaacaaatcatcagtaaatctagatatctccaaggtgcactattgcgattgatacttttgttacatgtattgatataggcccttagatgttgtatataaaaagtaaaaactgactccaaaattcattccagccatttttagctgttcgttttctcaaattcatgtctcagggtcgtcttggaatgaatcactcaatccaatttaaagattcgatatatttcgtttcacacatttacatcttcctttcagaaactgctcctacataaaattatgtaatagattatgctattctaaaatacataagcctaacatttacttgaatcaggccacatgtttctgaggaactcctcactggaggataattaattaaaaccacctgttttgaccagttttttcaatttttaaataaaaggagaccaaaatatattttttacaaatacagtaattttactagtcttaaaaagcgattcttggcgatacgctgtaaaccaaggattctactatactttatgtatcattattaaaagataaaggaaaaaataaatatttattaatatatattatgacataatttatgttttcacggggtttaaccagtacttaaatttgcggggattccatgtatttaaaggcgtattaaatactcatgatacatcccaattcatatcaaataatatcgaagaaaaagtttcataacagatttttttaaataatttgaatatatctagtatttttagttttcaaattaaacgctcttgggatttaaataaataaggtaaagcgtgagaaaatcaataaaataaaaagtaaaattgtttcacaaaacttgtggactaattatcaaattaccaaaggattttatttatcattttaagttaaagatttttaataaattaaataaaggggaattatcgtttaaacttggggcttaaatcttaaacaaaaattatttagtgtaaacagcggctgttccatagaaattttggagatatagttcgttgttttagtcatactctccttttgtaattattatagttcatcctctgcaaagaataccaagcttacttctgtgtacttttagttgtaatttaatgtacagtattattccctaatatcatgtaaattatttcttgtatataataatgcctatccttccttcttatctctcaaattacgatatgaagatgtccaacaatgttatcgcaaccaccggagcttgtttgactcttttgtttgggattgcaattgtgttctcaaaatgctccggggagttgccagggctctcgattggagctcctgtagaaatctgtaaaactaggctttcttttacttcgttttttctcaaaattaaactatttttcattgctctacatagattaacatactatcccacctacagaaagtttaatcaggttttgattgaacgagccaagagtattaacgacagcgaggctgtaactgtaaaagttaagaccttttacttctccaggcacggcgagtccgtgtataacgatctcaccatcaatagaaatgtatttataatagtattaaaaaccatgagactcatattatttgagacgcttttgttgttcactaatgaagttctaacttatgattccccgctgagtacagaggggatttcaaaatcactgaatgcagcccagtttttatcatcacctaagaaccaaaatgaccccgacatatccatattaaacgggaagtcgacagtaccctcagttattttaacatcgtacttgaggtttgcaatatagtaaatataatattttcaggcgtgctcaaggcacagtttcacttttattccaatcccgcttaagcaccaacgatgagaatattttcataacccacgaactagatgtgagtttacaattttttattacctattttttgttacttctttttattacctatttcaatgcaaaacaatctaatttttatttaggaagttgttaggaatccagattgcattcctatgcacagtgtttttgactacatcacattcccactgctggaacagctgtacactccccagtcttactatcgatacttgaggttgaagtcagttgaagaggatccttacgacattactaacccctactataaaattttaagattcttcgacagggttttccacagatttgacgaggatgtcatcatcgcagtgggccactcgagatggatcagatacgccatgagaatattctttccacaggtaatttcatgttacattcaataattttagaactccgttgattttgacattttaaacaagaaactgaccaacaatgggattatcaaggttgatgttcacctgaagaaggtaattttttaatttttacgattcttcagagtcctggcggagaccacatgtacatgttcgatcccaagtcttttaggattatttacggttcttttaaataatattatatcatgtacaaatacgttattaaaatttatttactctgtagtttataccgttttcctccagaacttcaaccagccttttcttatcctgacttagcaccatcgctctagatttataaattccatccaggagttcataaatgaattcatctgcctccttacccactctgtgcgaaatttattaacttattactaacctcttatacagttttatcacttctactattgcacctggattgtacaggagcctcttgcaacccttcagctttaacaccagcctattactgtagtttacatccctaaaggaaaaatggttagaaatttaagattaaatacttggatgagaattttatcagtgagaccaattcttttgagcttaaatttgtgatttcattgaaaagaataccaaaataacggtccattttatccctcggaataaccccagtgaagtagtcatggtcataatcctgaaaaggcgttagatttgtgaaggtaccaggagtgtggtgagctcagataggcttaaatcttccaaattccaacattcagttacgacagaatttataaaatgaggaaaaacgtcctaataacagttaaattgcagaaacaaaaagttaaattaaatgaaccaagtgataaataagaaaacatactggtggaatggaagtttttgataaactggagtatagctccagtagttgatttttaccaagattctgggatttattggaaaattcacccaagaatttcaactaaaataaatataaggtgtgaaataactatttgatgtatagtaaaacaaacttgggaggaatctagtgtttgcttagagtttaaaatcgatactgcaacttcgaaccacaaggtatcgttgttactcaactcttcatatttctttaaaacttctaaacaaatttgtttatatttaaattaacctttttcaaatgaggtcactaacttctgtatcttattggtaatggtgttggtgatgtttggaaagctttggttcttaagtttactcaggagatataagtaacgggcttgttcctcatttgtggagtcgtaaatgttttcattaattctgaaaattagttattataaaattaatttactttgtaagtatagagtttagcaattgatcgtttttgaagttgaatgttatgatggagtttaaaaaaatcaggttgaaatagtgtatacactctttggaggattccaaaatagaacagcactcgttgaatagtctggctgagcacaaaggactgaccttatcatggaacctacaacagctatctaggccatcaaagatcagaactttgtcaataacactcagatcactaacttctatagcttcacctaaacatcgattaggatttttgtaaacaaataatttatgaattttaatgctacctattgctaaaaggcagttttgagagacgttttctacgttttttaaactcgataaaaacctcaaacactctattggatttagattaccgtttaaacaaatgttctcggcgtgtttcagaacatagttaaaggtcctaaatgagtttagtaatataattaatggtactgttcgtgatagtatttagggttatccatggccaaaattacgttagaacattcttctaaggtgaattgatctagggttgcaagaattcgaccaacaaaagttgagacaaatttatgatcatagtgggaacttagtgaaaagtacaggtacaaaactgatataacataggtatccagggacattgcaagtttgagagctttaagtgttaacttgtgccatatgtcaatatctgtaattccattttctatacagcgataaacgacctaaaagttctttaaactataaaacaaaccattgatagtgtagagctgtccatacagtgggtgtatagggatcctccatgtttttcaatgtttaggacatctgggaatcccatgaatgtatctggatttagaccttttttgggaaggttccaccactccttatcagggtggagtcgacccaggttgtaagggtcgaccagtggtcgaggagtcttaaatagcggattctgcttactccatgtcttcttagctaaataaaatttgattttaaggtataattattataaatattagaaattaaggcgtttaaagcacattgacctactaggtggattatagaatcttttaaaaatcacagatgagtctagttttaatattttacattttattatgtacattacatttaatactttaaattaaaatttccttggactaatatctaattaaggagaatcatgcgcatatagaatcactaaattggagaaaggaaatcaaatcaaacgagataaaatctaaacaatcaaatatataaaaaatttattaaacaaaataaatacagctaaaataacataaattaaggctaatttatcgtaaaatcgtcttgtatagggttattaaaagtttacatacaaattcttaacacatttaaaaaattggggattaatctcaaacaataggatatataaaaaataacgatacaaaataatagtttatttaacgcgttcgaaaggtttaaaatagggtaattttgttccgatttgttaagacatatcaataggaaaataaaaagggcaacttctcaaaaagaagtatgttataaacagtaccaaatttgttattttaaaagtgctagggcattaatgtgtaaattaacattacaggtgtgtagctaattttttaatggggtgtgtcgaccaaaaaatacatttgttttactggctgcagggtttatttacaaattatactatagctattaaaaagaatagttttaacggtgatatgctaatcccaattattgcttaacaacgaattgttggctaataatagtatttaactttatgcaaccataaaacaaccttgcataaacttaatagtacctgctattgttacacatttgtaaaattcagaatcgttttaacaggagcaatatttttagagatttttattggagatgttagagactgagactgtcaatagctacgggtacactgaggctccaggcaataacttttttgacagtgagaatctcaagtgcttgaaggcacctttaacctcaccggccttcaataatttttctactcacatggagactagcgcagcacgtttggaggaaacattggagttattaaacttgaggtatcaaactttattcttcttggcctccgctgcccttgttaccagctcagttttttcagtcacaaaaactttcggattcagtaccttgcccggattattactctcactctttttattgtaagtttaaaagtttatatgtattcttaggactaactcattgcttgttatggttttggatattcccgggactccgaggtgggcagccaagtaccgcagacacataagaaagaacatgagattcttgacaagattaactggaaaatctttgtggcttgcagtattgggtgcatcgaatatggtgaccttgaagtccaacagaaaggtcggagctcttcgttttcttttcggaactttaacctcacttttcgtctttgccgtagcagttaccggatttgcaattgtattttcacatttttcttattatcttttaggctgtaaggaaaagctttagacttgaaaaggcaaggaacgtcgtgaaggatgcatccaaaggtgcctatatagacgttttccgcaaatatgctttatctgaccctgaacatggaatgcaattcggtattttatttttccattaattttatttcagaggaatttaacaggctttgttccgattacacttctggcagacttcaattcgatattgttgatctttatataatctttaatgttctggacgaacaccagaagtgtgcagttaacgaaagggagttttatgagtggctggcaggctcccttgtatttttatgaagattttaaaaatgtaaaatagttaatttattccaatatatcgagtatgaattagttattattgagtttataaagtacatattaacattagtacctattccgttacaaatgaggcagctagttcttcgttccaacctgcaatttctaggagttctcttgcgtgttccggggtgatgctgagcacctcactaagtctaagaatttaaaaattttaaatttaaaaataccttttaaccttttcattttgttcagtcgatttagagtcagcaactgtattggttttagcttcataggtactagttgattgttgagaaacagaagtggaaattgatggtttattaccggatggcacactcctagaataactcttaaaagtcactaactcggattctgatagaaatggaacatttacatcgtttattcccaaataattgtacttcaagttaatatcgcaggtatatctgcgtagtatatccagccctagaataaattccaaattggctccatctatgacaatgaacgaaactggaataaatatggatcctattttcatatcagccaagtgtattttccccaaagttttagttgatcccactcctctaaactcaaattaaatccaatcacttacactgcaactcctttgaatctttcgtccaccaggcttagcaaattacattgtaatgcacattctttactcattatagtgttctattgtttttaaatcataatgtttaatatacctgagcaccggtgtccactaatgccttcactacgacgttgtttatttcaaccttgatatacaacatcacaatcctgcctaaaacaactcattaaaaaaaatattttaccaaatgactctggaaagtagttttgggctgacattaaattttcgtcaattctgttcttttcaatttctttatgtattaaaatttgcgattctgggtttaagggatccaaatatgctttcatcaagttctttttgtgttccatttcctcctaaacatatattttaaagaaatttaacctttttcttctcttcatattcgttctttacaatcttataaacttcctcagcgttttttgttagaactgcgttgtaaagttcctggttatggaacttgagtgtttcaagttgagctggttcacggttaaactcatctaaaatttctcttgctcttgtacgaagaaggtcatctgtataagtttttatattaaaattgttatcttacctgaaatggtatcgtagtcagatgataaaagtgatgaaaaattcatatttccataatcagattttactagcaacacatctccgttttttaaaccggaatccgagatcaaattaatgtttccagacagtaaaactccatctagatacaatttttggttatttactggtatatttaattgatcttttatcaattcgtttagttttgaaaagctccagtcattttccaagtaaagagttacaaactggccatctgaacaacacatttaattaaatttactaaatatatgttaccttcggccgccactttaatcataagcattacaaagtttaaaaattaaaaaattataactgtttttcctcattgtactcatgtatgtggatacgacatataaacgacaattccataaattttataaaaaactgaaagttccatataaagatgcatacatttattaataattaaatcaagtattaaaaattactaaattaaacaaaaatttcaacagtctcagaaatcgagattcaattgagtattaactgaacaacctttgttcttaaattgtgtcttattaaaattactttggggcgtaaaagaaccagtgccttgcaaacactgtcaaattaggcatgaggacaaaaactggcagagcgaaagcaagtagttgggaaggttttggtaaaaagaatatatcagttcccctcatcttatttgaacattgatctccaaaagttgtagctggaaccaacgacttcacatccagcgtgctagtacaccctccattagagtcgaactggcctgaagaatctgaagatagtggcaaagttgagagcttccttgcaaatgaaacatgtttattaaacctagtctgtgatagcgtgtttcctcttaagtttgtgtcatcggaatttatttctgtattgtatatcatgtccctcatgaaaggggcagtatatggccttcttgaccatccgaaagtcatattttattaaaatatatatcccagagtttaattgaactttattagattttaatagaaccaaaatttattatttgaacctaggcgattcaaattaatttattctaacttgaatacacccccatcaatcctaaatataaaaggaaggttatgaattcttactactctattccctaacacatttacactaatcttatttatatagttacataatatgaatttattaattttgtaaatttatttcctaaatacattatgttacaggcttgttttttatattattttccaacacgtttccgttgttacccaaaatatccttcctaaagaaaattaattgaattcttaactattcaaaccttatcttatttaggtatattatcttctgcttctcatcaactaaatcaaatgataaaatccaggattacctaattgagcccactcctggtatggtatatgaataaccttccatcctctactctttaatatctaaaagatattgtttcacaaaacctaacctcgtgttttaaaatcgatttaatgtttcgcattacggtttcaacatagaaatgagaaggcccatcatactcgatagcaacattttcggcacacacagggactatatcaattaagtaaggcccaacttgaacttcatttttgtgagttagcccaatctatagaacaatgaaatgacaaattgtttaccagattcaaataatgtgagatttccttatgggcagacgatgatgttaacagatactctgccaggctaaattcaaccgagtttgccttttctagaacttctcttgatttttttgacatggacaaaaattttttaggcttctattaaaaattaaagttaagatagcttacagtttgaagatataggtatatggtcttaagcctgaacactgtactaatatccattttgtgttcaagaagactcaaaagatgatcaagaagattataaaagtgctctggaacttgataaaatgtagtattttgccctgaactttcagatatctccctatttaagcattcgaaatgcgtgattgtatacactattgcaattgctatttcagacttctcaacttcatttagctcatgctgaactgccgttattttatcagccagtttagttaacaaatcctaaaaagccttaatatggttaaaaagtaccaaatcagaaactctgagcattgaaagccttgagaagagaatatgcaaatcatgattgttgaagtcatttagttgataatttatgcacaccgacaattttttcaggaaagttacgttacgatatgataattctaaggaaatatatagattttatattacctgatagtgagtacactaagtttgcaaggtcaatcgttgacaagttggccaactgcaaagaacaccttttaataacctctttggtcagggttgggtcatatatcttgagcattgctagagccttaaaagccttaattaaaactgacgggataaactggttcaccctttgtttagtttcttttaacaattttcctgttagtttggaatttttcattccaagtttatgaaatgacgttagaacctttgaaagtgaaatggtgctaaatgcgttgtaatcatccagattttccaaaacttggtttataaacggaactgatccatcaactttgtttctagaaaaggagaccatcaatgaagctagcatttctccgcttatctcttctctatgattttttagtcttgacttcaggagtgtggtcaaaactgagaaaaccctcttatccttaaaccctattctactgaatgcctgtgttatctgttctagagattgaaaatcgaagtcatatctttcatatttaagtcctaacaattttataaacgtttaacgtacctattgttcctctatatataatttcgtcagctattctgtgaaataaaagtgatggtgaataacctattttagcataggaaagtgaaaccagccccaattgcctaatttactttgagagacaaaaattatgaaaaattatatatacacactcactgtggatttaggtttgacactctatatatgagttggtgtgctatttttgaaaacaaatccttactcctgactcccgcttgggagtaagcgtgtactaacagcaccaaagataaggttttggtttctccatttatcttttccattaactgaacagtttcattaacttttaaaatacccatggtataaacaggttgaataatttatggtcgaagtattcaagttttgagaatgaattcaggataattgagacgtcaatcacgttcattttattataaaaatccgactcagtatctgaaaaaacactaactaattttttagagcaggaatccataaggccatcagagtatttgatgttctttgcaaaggaatttaatatgagtgagaaattctaaaaacttaaattactcgtttgaataccttgggaaggatattatttactattctattgctgttcatctctataaagtgtaaaatttcattatgtggaacacggagtctagcaaacgaatttacaaatattgcgatatcattcgggtccatagtcttaagactcttgggtagaattgacacagtttggtcaaaaaaggtctttgtgtgcccagtataaggaatactataaaaattgattttataccaactcacttaagagaagctaaagctgaggctaattctctaagttcccatacttcagagtcattaaacttctataaaatgtttagacttcaaacctgaccttgttaaatgtttctactaagtcggcaattgtctttacagatctggatttaagatgtgcatacgaccttagcaaaatggctatttgtttcgttgtgaaattttttgacaatctttgaacttgtaagttcagagactgtacatattctgacgtaattttagggaattgtctgaatttattgaaaattttggcgtaatcttctgggatgagtgtggaacttatatgtgatgtttgttccaccaacttattatagtacacatcatcaagtatctttttaacatttaagtctgatactgcatcatatacatcaagtagtttagttctacttgaagaactcagctcttgaggttccaacagtttctaaaaataagttgtatcaattatttaaactaacctcatttattaacttaaaatttagtggagttttatcttctatgggaatcctgattatgcgatatgatgagtgattcttaaatgtgtaatatttaaaatattttacagaaatacaaaaattattccatctattcatggttttaaattataattacaaacaaaattaaataacattataaattgagtaaagttacaaattttaaataaacttcattttttataaataaacaacggtgtgttgataattgattacaacaccctatacctcggatgcagattccatgaattatgtattatatatcattttaattacacaaattttaaacaattttaaaatattttaatttaaatttataattttaatttgtattttgtaatttacacatttactttccctaatatactccaaaatgcaattaccttccaacttcttacacataaatttaaaatacacttcaatggatggctaacattctacaatttgatgatattttcacctggcaggtttgcatatcatttatatttttataacgatttaattttagagtgatacttaccgttcggtatttgtggatagaaagaactcatttttaatataccaaaatgcctttgacaagagtattcgtgtaatagatgccaaaaatggcaaatcagtctacagtagtaacaggttctatctctttaaaataataaattataggtttaacaagcaaatatgtgaatcaatactagtttcatctgacagaaacttcatcttatactggttcaatgacccagttacaatagtatgttgatattacacacttatagtttcagggaattcacaacatgcttaatagtgacgagagtgatgttcttctggatccttcacagtacgaggattcaattgtgttgaaagttttttggtcagataatgagaattctataaactcaaactttgtgattatttgtaataatagagtggatgtatacaatgtatctttagataactacatatggcctagaactaataaacttttagttttcattcgagagttctttgctcagaacactgactaggaaatcagttagctgtttagatgcctggaacgaccttagcgggaactatttcatacttttacatcacaacaagtctttaaatccatacaaaataactaacaatgtattaacactatataatattattatttacaggaaatatcccaattgcctgaaatcggaataacgctggcctacggtcaccagatacaacactacgaaatatgcgttgctacactgtaattttaattttattattaattcctctttagatatgaaggcacatactgtatctataaggacgttgttaatggcacactgtcgcttagatcattgaccaataataaaatacatgataaagttctagaagtaaacagccaaggttatcaaataactaattattccaataacttaactttattataggctggatagagatttgtgtaattgataacttgctcatcgttttaactggcagtgggacctgctacgtctttgacattgcaattaaaaatgattacctcttggcaaaagttccccagaaaaaacctccaatttctgcaatatctagtgatatagaaggttcatttacaatttatatagttattaattgaatttttagcattcataccaaatatcgttgttgacttttatggcggatttgcatactacataagtctggatttcaacacactttctctttatttgtcgagatacttcacagaagtaacctatttttatttcccaatattttaactatcaattaaccaacaaatttgtagaccatgtcagtcgagttttttcagaggcgaatgaattgcactgatcgagccatggaaataatcacaacctcaatagagaataggttttttgtagttaaatatctgtttatagagttcaaattaagaatttactgtcactttcactgactgtagcagaaccatattcagaaacattaaaaaggtttttttagtcctaaaataaccactttaggttaaataaattaaaagggaacactggtaaagggcatcctattccatttaacctgattgataagttcattggagaaagatcaataataacggagcataactttgcaacatctgcgctatatccatacgtgattagggtaatccacactattcaacagttatttttaatgaaattaaccattaatttaatttattttataatttttaaggaatggaagctgaaaaatggagttaacctgtttgatttttcaatatctctactgtgttatcacaggaatattggtttccaggagttgatgaaggcaaaaggtattaaatcagatattcatttagttttaatttacatttacaatattgattagagggggttatcatacctaaaaactgtgttaaccattatattgttaaaagccagatattgtctgagtccaatgaagaaataaactttgacatgagcaactacttgtcatattttgacagcacagtatcaactgaggcttcaccgtattcaggaactaagactccagcatcacacactaatacacatttgtcgactatctcctcctccatgactaacagtcctgcatctagtcccacgtccagaaattttaacagtgaaattggatttgaggacgaggttgatcccttttataagagtgagaggaaggacaaagttccagaattgtatcgcaacaagaaaactaactatataatcatagttacactttgctacattaaatccctagttttcaacagacttcatccttcgaacatgctgctcgtgtttctttttgacgtttgcgtcctgtacaataacctgagtctgcttacttacatgattcgagctagggttgtcagagacaacttcttcatctgctacagactgtatcttttatttcacgccctaagtgacaatcacatcaagcagctttcctatgatatgtctaagcgtctaaagttatatacaataaccattaaaatactcttacacgacaaacaggtttgactatatatcatataatgcagaattaaaattgatttatagtactacaaagctctgatgttgatcaagaaggagaagatcgactatcccatctacagggtactgtatctggctgccaatgacgtgagtgaacagaagctgagaccttacttgtggcaactcctaatctcgttcattctcgtctgggttcaggaaaacaagaacgagcctcagaagcacaccagaccaaacctggaaaactgtcagatgtggctacctgatgtacactaatatgtttttggaattattctccaattaatttgttaattctctacatttacattattttataatttaattttgagtttaataactacgtaatttactacaatttaatttgctacaatttaatctactagaagtaacttacatttaagaattttttattgattttgtggtatatttggtaaatttgctcggtgataaaggtgtccaggtattcactttcatagtctttgaaaacttccagcaacttgataacacgttcaaacgagtccagtgtagtaacttttcttgggagcgtgacaatggtgttgagcataaccagctcatttttgatattcattagattaaactcctcaaccagcttcagcatattctaatcattaatttatggataattaaattagactatataagattaattagtgatacatcaatagtatattgtgaaatatgctttacgtatgcagtagcaatttgatcgattaaattcattggaaaaggttcacctagtcttctgatgacttcaaccagttcaactatgttatcacttgtaaacctagttatgttttcacttatgattgggtaaatattactgtggacatattccttaattttattcataggattttctttatccaatgtaaaattttcattctgatcagatgaggaagtcaagttggttgaatcaaaattattcatgtgataagtgtggttaataagatggagttttgaaatcttcactaatatgttacaggtgtagagagaattgggcccaaaagcaatcttgttaccagaatgctgagtagaactaggagataatctgtaatccagtatcaacttggttaaattggataaatattcaccatttatagtaataaatggtggtgcttgtccggtttgtatcgaaaagaatattgatattattctgaccaaatcatccatttccaggatacgcatgttatcacaaataaacttaaaaatgttattaactaggtgattattctccaaatccccattattctctttattttcagttttgcttgaagtttcattattcattctagaaaattttaaggcttcaaagctgtactctacaagctctaagcatatttttgatacaaaattaacatggtcattattggagtgactaatttgttttatctcttcactaattctttccagaaatagtttaaataatttactgctaaaactgttgcactttctcagagcaatgactaaatccagaatgtcggcaagggagattttgtcaatgttttcctcaattgaagcatataaaactggttttatctttgatgggacccttctcgagaagtttaaagtgaggtttgagataattgaacttattttagatttgtcacaaagagtattttcacgaggtgtcaggctaggtgtacttggttcctctaaaaaaccactatcttcttcttttaattcatccctaaaggataataaatatatgttagcaaactttcttttcagaaaaaattcagttccaagaaaattaccataatccgagctaaaagaactcctcaaattagacagtattctcaagcttttcctcattcttgcagtattcccaatttatatcgctataaattttaaaaatgggataaactaacctcataatcaagtataggctgtatgccatcgacactaaatcttggaaaataatgttattttcagtgctaagtttttttaaggatccagattgaggattatcactggtttcctttagtttattaatagtaagaaaatggttatatgctactgcaaactcctcctttttatcactaaaactacctattactaaatttaaaaggccttttaggtctataattctgtagcacttttcacaggctctctaaaaaactattaacaattaattaaaaaatacccttaatgatacaaaattgatttttctagccttaaaatctatgtccactatagggaagttgattttagatgttttataattacaaaattcacaaggttgatttgtatcaatgtcagtagttgaccaaagtgaaatcaaatctgtaggcaaaggggtaggagccaagttatatccgcctaaaatatataacatgtgttcaattgggggttctgaaccctttaaatttggattagggatggattctgaaggagatggttcatcattctcatggacagtatcttcggtgtccatttaactttagatgatttaaattaacatggaaaaacactacaaataattatataatacagattcagatataatttaaaaattaaattcagttaaaaattcaaatatctatacatcgagtggaatcttcactacgaatatatgtgtggagggaaatatcataacttatgatgaatttagttatttttagatagaatataaatcctatgtctattaatttaataaatttaaattcgtttaaaattttaatattatgtcgtttccaatattaatatcgcttcttcctttctgctacacaaaacataaaagatgattttatttatcacaaccaccctattgatgtttaaaaggtatcattttagtatcataacaaactctattttgttgtctatcatcttttataacgttcgtttcaccaatggagtcaataactacacatctctaggcaaatatgcctaccttccacgatcttccatgcaaccagagaagaaatacagtgaagagaacacgagctataaagttagaaatataaagaggaatatctacgacgttaaggctccatttgataaggagcacgctatagagtacttttcaagctgcttaaaggcaacgtgtaagacttttgagcccagagaaattccagaaggggaaatcttaacactaactaagcaggtcgcaacactaggacctgccaccaacaatgcagaatcaataaaatcattattcgatgcaggcgtggatgtgttcaggctaaatttttctcatgactcaaggttatctaaacacctggtttccaaaactattaggcagttggagataaatgaacctcctaaaaactatccattcaacggggaccatgttgtagagcataaatctatacttggagacatacaaggcccaaagctaagaattgggaaattcatgcccaacttagacgtccctggcgttcttccaggaagcaaaggctgcgaatttgttgagctcaaggctggagatttgttcactttcgacgcttacgatgtgctgggaagtaaaagcagagtccagttggatttcccagaaattcttaaggaactaaaagtgggcgacaagattttgttggatgacgggaatttgtcaatgacggtagttaaaacaaatccagaagaaccatctgttactgctgaggttaaaaatgactacaagctttctagcagaaagggattttcagtaccaaaagtcgttttgccaatagagtttttggatgaaaaggatgttaaggatgcaatattctgcctaggaattggggttgacttccttggagtgagttttgtccagaataagtctgacattctgtacttgataaacattttaaatgatttctacacctctgactattacaaacagctcaaggaaagactcaacaaccttgacgtagaggttttcgacgctaatcgcgaggatacaatagtggagaatatactaaataggtactacaatgactcgtaccttcctaagaaggatattttcaaaagcgtggtcccgaaagagaatctttcaggggtgggaataattccgaaaattgaaaaacaggctgctcttgacgacattcatgaaatcctcaaggtttcagatggtctcatggtagctagaggggatttgggaatagagacagatcttgccaatttgccaatagtgcaaaagaggctgattcagctgtgtagagtagtatatcgaaagccatgcatagttgcaactcaaatgctggagaccatgaggtcgtccccaactccaaccagggctgaggtatccgatgtatcaaatgcagtttttgatggagctgatgcagttatgttatctgcggaatccgcaactggtcattacccgaaagcaagtgtgaatgtccagaggagggttctattcaccacagaaatggatccatacttcccaactatgcagataattaaagaaatgctaatagatgagaacctgatatcgtcaatcaagtctcaaaggcctcacttgtataaaaagatggataacttactaaatattgatatacaccactataatgagtatttgaaatcgaagtcgcacttgaagaagtgcctggatgatgtagccgagattttcgcctacaacgacgtggacgttattgggatccactctgatgacgggcttgagtttctccagtggatttctagtcagaggtacatgatacccattgttctggtgactagcaatcccaccctttcaaggcactctcagcttacctggggagtcaagtcgcactttatgcccaagggtgcggaccctatggagtttttcaagtatgtcgtaaaggagtatcccatgcccgttaaggacgctgtatatttagaaattaaggataacaaaattcaatcccgccaagttttaaaactagaataacttgtaaatgttttttgtacattatatttatcggtatattacatttcgtggtatcttcagtctatggtatttgcagtctatgctatgaaacatgggtagttccatctgactcttgatctatgtggattttccagtacgtatgagcttttgattgctttaaggtgtgaatgaagtcttgaaaagttctcagtatccccagatttagacctaattttcccttccaggtccaaaatcgtattatctagataccccaaagcctcctttctacacatcgtcgacttggctaaagaatcataaaatacttaatcctacctggagtgttgcacagtctgttgaacaggtgttcagtaaattccaagttaggtaacttaaaataatatgttttcctaagtgcgtcgagaatcgtgttgtaatctgagctgtaaatcttatcaatgacgtagttcttcctctcaggtgataaaagttgggaaattttaacaaaggagaatatggagccataatcaatgatattgttatttaatacatctttgtcaagtttatctagtaaatttgaaataaaaatagactcaagaatgatttctgagaacttcatatactctacaatttcagaaatacaattagcgttaatctggttaatcctatcccagaggtactccatgagatcgtttgagatatcttggactcccctagagtccggattaaccttaccaaagattcttctgcttagtagtagtgaaaatgtgctcagaaatggcaaaaactcatcataagatgatgatttaatagagtcctttgaatagttatttaaaagaatagtttcagaagcggcatcttcatcaatacaagagtacacatacgacattagagaatactcctccacagaaaacccatttttatcaattatcaaaggggcagaatacctcaaaatgtttttaacatcttgattatttaaaaggttattaattaaaaagcattttgacataaaaggaacatggttcttagttattttactcctaactagatacaaatcagatatttttgtggaccatatgtttgcatatctctttatcttcctctttgatagttcacctaaagattgaagtatcaagtcgatactagatttcatcaaaagcaaacccgtcaaatttatgatattaatagtttaaaaacattatttatttctattaactaaatgataaaaaatactacatttctatataacaatgaaatacaatataggattccataatgtggaatcctggggacttaagtgttaatttaccagtttaaaatttctaaattaaaacaaattaaccttattattgtaaacaacattctactttttatcgatgtgtaatatataaacactatttgatccgactattccattaaataaacatttgtttatctgcattttaaatttattcctggaaacaaatgtttattaaattaaattccaaaaattcattaataacataaatgagatgtattctaaccaacggttcacttgtaaatattatatttcccaacctcgttgataaaaagttcataaactttgtacctttataaccataacttaattttttagggtatttttaaactgaataactatagcataaggagtgaaacatctaattctaaaggatttgaaactaaaaatttaaatttatccaaaaaagattctgatactaacactaccaagataaccgtattactacacaaaccatatggatacatgtcaacgtacagtagaaatgtaacaaacaacatataaatactcaattttcagtcacaaaagtggtctaaaaatttattgataaaagaaaatcgatcagataacgacattcaaaccggattggagccttataaacttaataaaatatttcccctaagtcctttggaagttaggtgtagcgggttattgatttactcacaggtatttctagctcgttttcttacacattgtaggataaatccctatttaacaaattctctgattgtgaagaggagttttacgtagtttttaaagacactcttactgactataaactaaagtttttaactggtgagatatttctggacggcagctctgttggacctgtagaagtaaaggattattctgaaaaaagtgcctctataagtttcaaaggctcatctgctaaagttagtttcaaaatcacattactgcttagttaaggaaaatctgtctgttggcaggtcttgaaataaaaagccttaaaagaaccagaatttcagatataaaacttggatcgctttctcctggagaatggaggcttctcagaccatatgagcttacatgattgaatgagatgtttatttcaaacattctactagcttccaggcaacatggctggaggtttgaaaagcttcgaccaacctttaaaaaatgggtaaggattgatcatccgcctcaaagtagatccaacctaatcaaagtatgattatatgatattttatgcaaagtaatttttactaacatctttatattttagttggatgataagtataacaagctgatgtacgttacaaatggtcgaataatcccaaagaagagagaagaatttttaaaaacagggaaacattatgttaaaaaaggtttttagaagacaaattatataatttaggggatgaaatccacactccatgcctagctttcgctaagggaggctctcatgagtatgttgatttttgaatcatgttctcaggctacttgagacgttatctatggacgacgtatacctcttggaggaattaattcctgaaatccaaaaggcttttgaaggtaatttcacagaatttactttattttagagtgtgagaaatctgaaaaacctgaaactactgaacatatttcaataaagtattaatatttaaatagtgtatttttgtgaataaaggtatattgtattaaaaattacatggttgaattaaaaattctacattgtatttaaatctaacacagagaagtccgtgtgaacaaattattctgtttttctttttttacttggatttgtttcatcttcatgttcgtgattatcatcgaggtcacgttcctcatcttgaggtgtttctctaagtaggaaagaaagaggtcgtctattagtggaaaaagactctaacatttgatatattacataatcttgaccttccaactccttcctcaaatcttcccttacatccttcgttacattttccctcatatccttcgttacattttccctcatatccttcgttacattttccctcatatccttcgttacattttccctcatatcttctgttaaattagtgggtccttcagagcttagattactggaattttcttggtctggaggtttagataaattttcagagccaggttccttcttagacttatctatgttagcctcatcgaccattttatcccatgtactcaacaactggtcatcaacaggtgaagtcacttttaaaatctgatcatatttttcaatcagtatattatcattcagtctccttattgcaaataactctccaattccgtaattttcctcggggtctgaaacgtcagaatctattggttccactgtcattaggggcgactctctggtttcttcattgtaccttttaaaaaaagggataaaatccccagcctttacgtcgtagaccagtggatacgagatttcactacggttaattgcatccaaacactccttttcgtgttctttagagaatgtacacaaaattagagtatgcttcatgttcccggagtataaatctgtagagtcaggaaccttaacctttagagcaaattcactacaattacttacgattctgtttaaaggaacttctaggaggctatatgggatgtataataatcctctgcaaacatcattacgacacacttttttatcaaaatcgagtttcatggacctggtccatcttctgaggtgattaacgcagtcttgagtcaccttacaagtacaaagcggaggaacataacccagtggcgatttctctctattccagttccaaaaatctaagcctatcttcccatgcctttctaaaaactctccatcgggactgagaggtgagtaatctcccggatggataggccaattgtaatctggaactacattccagtgtaaatcatcatataattttagttgatattctgaatttctctgcgatttatggtttatttcgggtatattttcctcattgttttctacaatggaatcttcagcccgaatcgacttcaaaactgaaaattccttaaataatttaggatcttctattgcctttttaataaatgatttagatactacagtttttttaagccagagttgttctcttatgatacatgagaataagggtagattgagaactaagctcgcgaaatcagtttcattttcttgctcctctgacattttacaaattaattttacaaatttaatatcataatgtataaaaaaaggaatatatttaaaatatatttattaaaatgatagtgacatcagtagggtgtcataaaagccgattaattttgaaaatcaattcgttcggattcctatttttattttcactattacgataagattcatatttaggaatcttggtggctgtgctatcgtttgaaatatcgctatcaatcttggaaagcctcgtttctatgcttgatggctcctgtgtaacggctgtttgatttcttttcatgggtgtactgactgtatttctaagtctagagcattccgggtcagtttttgagtgttctagtgagtcttgaaatttctttacatattctaaaatattgatattgtttttgaaactatatggttttgttgtaaacttaggtctcgattcctgatcctgtgttccatacacatcatgaaaatttgataaatttaccaaactttttattgatttatcatttcttagcctgctttctttatcgtaatttctccttccttgtcttcctgctctcactagtagtgtgtaccaatcttttgtaagtttactatcactttcttcctgtgccttgttttcttgcgatgctttgtacttcataaagttttcataatctgctttggttagcgttgtaatgaacaaatctattggcggttcagcccaaaagctgtaccctaggagttggagtgcacttgctctcttattagggtctttctggagtaggaacgataagagtgagttgagcttgttacttctaaattccagtggaagaggaactccttgcttcatctcttgagtcagttccggtagcgtcgtagtataatgaaaaggagtcttgcctgaggaaagttcgtaaagaacacatccaagagcccaaatatccattttgtcatcatagctctttgtgttcgatagcaacagctcagggcaccaataataaggtgtgcctacacacgagtttgcaaatgagctcatgcctatttgtctacacagtccaaagtctcctattttacaaacataacttttgtttccatccttattatgttttgttgaaagtaatatgttctgaggtttcaagtcccggtgtaacactttcccagttttagttcctaatgattcatgtttacacattaattttaattatgattataatttattttattacctgatttacagttatggcagtatgctagtgcgaatatcagctgaagtgctatgtcgaatatcacttgttcgttcaccagtttgtaatgtttgtaaaattgtctcatattttcgcccaaatctcccgcatcgcagtattccattaaaatatacaacaattgtcttcttttatctatcattctgtcgatatatctgactatgttcgggtggttcaattctcttatcacattgacttccatcaccaactgctgcttttccttatcgcttaggcccttgtatgccactactttccagcaaaatagttggcctgtatgctaaaaaaattttaggtgttgtatttatttgtcttggttaccttgtgcctgactaggaatacttctccgaatcggcctgagcctattctgttgactactgtataatttgcgattctttcgtatcctgatgtcatggttttttggtttgtttaatatttttattattggttattccttccatggggaggtgtgtagattggaaggtggcatgcaaaactgaattcataaatgtcaggtaggaatctcggaaaaaaagcccaaattactaaaattggctatttttaaaatatgtttattaatttatttagtcaaagatctatctagcataaatcaacggggtacacaaattaagctatggaaaaatcgaattaatacaatatatatattgttatttcttgttcctcgagtcgcaatttatacttcttgtggacagttatacgctttaattacataataagtgtaaccgaatgaacgacagtgtgaattttttagtgtggttcactcgaatgaatggtcctattgtagcaagcactaaagctttggacagaatttgtggtacaattataattaaatatcaatttttgatctttaaactgcgtacactgcgaaggaggtcaatccacaatcatctttgtattccttgctattgcgagtcaacagtaggtatcccttgtttccccagccttcaccgaatgagtttttgagtatccagtgattgcctttttcgtcaaagctgacacctactagggtcaagaagtggttcaattcagcaccgcatacatccaaggttccatcagcgtagaattgccaatcctcgctcactgcaactggtacagtgagtggtcctgcattcaacaagagtgccaccaaatctggctcatatgagtatgagtatgatgggactttgaatctttcaccttccaatgctgggcacttggttgtggatttgtctacgagttctgattcgaacagacccaagtccttaaggtatttgtaacccaagaatgggttgtttgcagatttcttatctgtaacgcaatctactaattgtttttcgctgagggatacggtcttttgtgatgtcttcttaacgaatgactcggcgactgctactacggagtatggccatgagagttcattttcttcttggcacttgactggagtcaatacaccatggcttctgagatcaactgacattggtctgttgttgttataggtggacacgtggtcttttggcaagttcaagagtactttcttggtgtatctcttcatgaaatccttggatgatatgtcaccgaagtggttcatgttcttggtgtacgacaggtttggttttgcgttgtgctcgtttatatcattaaggttgtttctgaagttggtgtacgaggtcttcttgtgcctgtaattgttgtgcttcttgtcgtgttgcttgttgaagtcattgaactggacgtagatcaaggcctcttcttttgggtcaaactcgactgcaaccttgtaaagaacttcagctaccatcttggggaagtcctcttccctttctcccttaattgtcacgaaattatcgaactgaagcttttcaaattcgactgacaggagttctctgttctttctgattgcgcttctgcctgatgacaatgctattgctgcaaaagtgaatgtgaataatagcacggcagttaatattacgagaacagcactgtatcttttgaagaaagaggcaacactgctgcgcaatggtttcttttctaacacagtgtcataattaaggacagactcagtgtcaacacgctccaaggcgtcgacttttacgttttctacttcttccattttagcaatatgtaagaatgtaacagatgataaaattttaatgtggggggaattagatcccatgacatgatttccaagcattgccttagtttctccttataacccttcatttatttatttaacaatcttttcgcgtaagtctttaaatgattttttaaaaatttattcgcacacgtttaatatgttccctgtcatgatcatccttgatcccattatctcattttatttttttggttttcctgttttgcttgctgttttctatatttttttcatttattttattttttatttattgtcttttcattacttttctatgcatttatttatttttacatatttttcatttatttacttttttgtatttctacattcaatccatggtattttttgaatattttttaccaacaatttttccaaaaataaatcaggcattcgtacatgttacgtattaaaaaactatttaatttagcatgtgtagctcagtatttgctaatttggcaagtggaatcaccagtggctgaattccaccttcctctaaattttgatcaaaatagcagataaaggtataaataaatacataagtgtaaagtcgaaacattatttgagtaatttctgtaattcatcgtaaaatacgaggacaagagcgccacccatgccacgaagtatgttagcaaaggcacccttgtagaatccaccaagaccttcatgtttcatcatttttacaaagcagtcgaagctgtttgcgtacattatctcagaggtagccttcttgccggacatcatcatcatccttctcctaacagtgtcaagtggatatgaagccagcccagccattatggtaacggactgtgctatagaccacttgaacaagatatttgcgtttttctcattttctccaaagaaaatagtcttggcgctatcgtacataccaaaataggctcctctataaacaataattccctgaactgaaaccataaatcccttgtagagcgacataacaccagtgctcctttgaatcttcattaagcagtccaacagtcctgtaaactctctttttgctcccttaccaacatcactggccaatctcgtccttgcaaaatcaagtgggtaaacaatcaacagcgaacttgctccagccaaaccaccagaagcgaggttagcaccgaaaaacttccaaaagtcagtcttctggttatacttggggaacatcctcttaaagtagtctttgaaagcgaaattaaatgcttgtgtgggaaaatatcttataacgttggcgagatttcctctccagagtgatgtaacaccttgttcttttgaaactctggcaaaacagtttaatattcctgaatatctggggactttcccgctcttaatatcaggaatggaatcttgtgtctggatcaacatctttactctctctatgggtgccacagcggttttagaaatcgcagctgaaacaccacccatgaggaagtcgacaagaaaattcttatttacctccattgtttaagtccaaatacgttacactctaaaggagatatttttaattaataattatccggaattgaaaataaaatatgatcaatatcaatacgtaattgatgtagtgaaaatcaacaaagcactataatcatggtgagctagtcacaatttattaaggtcttctatcttcgatatcataaccttttctttatattaaccttttattcatagagacgcataccttcgtttccacctgatatttaattttgtcttttatatgttagcagaatatttaaagtgtcaatttatctttagattttttattataattcttttataacagtataaaaattatataaaaacttcaaatcttccggttcacccaatttgtacacgagaatctttatatttttaattcacctatctatttttacacaattcaacttaaagtatatattttaaccattttcattatatttttaatttgtcttttggttcaccgatatattaatattattctatttgattaactgttattcataaattaacacaattataccacatcacaaattattccatatgtattatttatataatttgcattttaacaggctcataatggaaatttatatagtttattttttatatacgtacctgagcatggtatcaggtgtaagaagaaaccgatcttcagataacctcgttataaactctcttaaccgtttgactttataattaatttattcactaccatttatttacataattaattactctagactgtataaagcatattattctttattcttttttgtaattcttaattctcaaccttaagcattcttaacaattaacttttattctcaggaatatttaaaatcaatggagacataaagaagatcggagatataaaacgttccctaaaggaccaacacggatatcatgataacgagattttatcaagtggcaggattctgaaagacgatgaagagtattcaaaggtttctaaataccaccgtctaattaaacattttaaaaaattaatttaggatgaacataaaaaattatacacagtttcaaaaattagaggaggattgaacatttcagtccaaacaatgcaaggtaaccttcccttatttaccctgatttaaatttaacaggaaagacaatacagttacaagtatcgcaaaatgaaacagtactggatttaaaaaacaaattggaaaaggaacagacgattcctgtggaccagcagcgactcatatttgatggcaagcttctagagaacggaaaaacgatttcagactacggaatcaaagtattattccataattttaactaatttgatttaataatttttataggagaatgcagtgatacaactagttttaaggctaagaggtggatagtgggtagttttaatttttttgtcgtaaatttaacattaaaaattcaccgttaatatattttagtaatcatataatatttaatttctaattccggtttttgtataataatgtgcatatttcatgtacctctaatcgatagacagtcacaaaatttttttgatcttaagtgcacgttgacgtatatataataataatggtttaaatctataaaataacccctcattgttgtaaattataaaaatggaaaaattgataccattaataagcaggttgcatagcgttttatcctggactggagagaacagcattgacctgcctgctattgcagtaattggagcccaatcagtgggaaaatcatctgttctggaggccatagttggattcccctttttacccaaaggttacggtatagttacccagagacctttgatccttcgggtaagataacaccagattcattttttttagttatgtcatgataatggatctaaggattatggagagtttgctcacaagagaggaacaatttatgacgactttcagaagataaaagaggagataaaactcgaaactgagcgaatcacggggtcgaccaaaaatgtgtcacctgttccaatctttctgaagatcacatcaccgaaggttattgatttaacattaattgacctgcctggaataacaaaggtgccagtaggagaccaaacaaatgacatagaaatgcaaattcgccagatgattcttgaatacatcacgaagccaacttgcattatcttagccctgtctgcagctaacactgatattgcaacttcagacagtttaaagatggccagagaggtagacccctctggtttaagaaccatcggagtgataacgaaatgcgacatgcttgacaagggcgtggatgccattgagttactccaggggaaaatttacaagcttagaaaagggtttgacaaatttttaataaaatgttttagttatgtgggagtggtttgtagagacaaggatggcaaacaagacgcacctcacgaccacaatgatgaagaaaaattcttcaaaaatcacccatcgtattcttctatcgctaaaaaatgtggaattcggtacctgacgaatctgttaaatgaagtaagtttagttcaccgcaagattcttcagatgctcacttcgcacatcaaagacatgctaccgtacgtcaagtcaaaaattttgactatattacacgaatacgaaacagaattaacaggtaatcagtatttcaattgattaattaatgattgagtaattaacaactctgcagtatatggagtaactgacatcactagcacccctggagcctgcttgcttcactacttcactaaattctcacaaagattcaaggacacaattgacggaaagatagttcccagacatcacacttcccgactatatggtggagccaggatttacttcatatttaacgacagttatctgaggactctgaatgcattcagtcctctaacagggctttcagatattgaaatcagaacagctataaggaactcaacaggtccgtactcagctctctttgttccggaaatcgcctttgaaaacctcgtcaagaaacagattaagttactcgagtcaccttcccttcaatgcgtagaccaggtaattatttctaaactctcaattcacaataaattattatattcgcaataaattattacattcatcatcaaattaccatattcaccattaaattattatattcaccattaaattattatattcaaataaaatcattttaggtttacgaagaattacaaaatattctcgagaactgtgatgttcctgaaattaatcgttacatgaacatgaggaacaaaatattaactgtagtgaaggacatgcttcgagagtgtctggagcccaccaaggacattataaaaaatctaatcaaggtaaacttcgttcttcacttatgacttcagattgaactggcctacattaacaccaaccaccctgactttttgagaaattctgcacttgctgaaatttacaacaccacgggagttacccagagaaacgagtgtcaaactccttacatcaactccaataaccaaatgatgaaaacagatatggtaggttaagctaaattaaaaatcgtttagcccgtgtttgatcccaagttcgaggcgtctccgaagcttttcattcagccacaaaatgagttccctgtgcaaaattcaaccttgaaaaacacggaggcttcgccaaagaccattatgcacaataacaaagtactgagggagaaggtatttaccttttagtagttaaaaacttttagaacaaggaaaacgcaaacgcgatatggttgcctaacatccccaaagttgttatgctaaataatgacccttcggagagagaagtggtcgagactgagctcataaaaacactaataagcagttacttttcaatagtcaggtaacacatgtgaaatcaaaattcttcaggaaaaacgtggccgactcagttccaaagtgtataatgcacttcatggtcaacaaggcgacggaatctttgcaacaggagttaatagccaagctatacaagaaggaactttatgaagaactcatggcggagtccaagtacgtcatcgagaagcgtgagaagtgtatacatgtcgtaaagtgagtttacaataattttaatgtttaaaatcacagatgcctgaaggaagcactaggaagtatagaggaaatgtcggattataaactatttgagtgatcaacaccaggaatcgcacatttagttttaataattactgtaatataataatttattacttcaaatgtgttatatttatatttcactattttctaataaaatatgtcaagaaaatcacttctggttgagaattcttggggatctctcccatttaccattgatggaagtgagcagtggattaggaacttcagagactactcaaatttaaaattaaagaacaatcactcagctcgacccttatgggtctgtccagacggttatttatacctggaattattcacacctgtcagcaaacaggcgctagattttatagtaaccatcgcagagcccgtatgtaggccagaactgatacacgaatatcaagtatgttctaaatcttctgtttcatttaaatttgtaggttacagtcttctctttgtacacagcagtctcagtgggactgagtttcgaggaacttcttaacaatttaaataaattttcaaaaaatgaattaccaaaaaagcttaaagaatcgattttgaacacatcctcagtattttattatttaaatttgaatattataggcgtttgggaaaattaaacttgtccttcgggatagcagatactggattgagtcatttgaaagaagtgaacttgacctgttactgacaaaccaagaaataagaaactctagaatccactcaaatatctgggataatcctaatcactcaaagacttcaacatccaatcagaacaatgaatatgtaacaatttctgttccaacatccgacttttcattcggtatagttgacgaatgtattaatatttcttagttttcaacagaaatcatgatgtgcctgagtctgaagaaacaacagttaccaaatttgccagtagaaatgacaaaacatcgacaaggcaagtattttcatttgaggttcaacaggaaaaaatcgaagaacttaaaagggaggcactgcaaaatatgaggagacccctagttatggaatatgatttcagaaaggataataactcaccatcactcaactgttgcatcagatcaaatattaaaattaggtacagataaagtttaaataatttaccatattaggtactaccaagagagagcgttgaggaggatgtttagtaatggaagagctaggtcaggtattattgtactaccttgtggagcaggaaagacactaactggaatagttgctgcctgcacagttagaaaatcgatttttgtccttacgacctctgcagttgcagtagagcagtggatcaagcagttccaggacttcactaacatctcgagaactaacttgatttcactcacatcagaacataaaacagacttatgggatgaaaaggaagccggagttctcatttcaacatatactatgatgtcatatacgaggaaacatcgagagaacactgagaggattttaagccaaataaagcaacgtgaatggggaatgctcatatttgacgaagtgcaatttgtcccggcgccagctttcagacgcataaatgaaatcattaggtcacactgtaagttgggactcactgcaacgctagttcgagaagatgacttgattcgcgatttacaatggttaattgggccaaagctatacgaagcaaactggcttgaattgcaggaaaaagggtatctggccaaggttatttgtaaggagatttggtgtccgatgacggcacctttctacagagaatacctgagaagctccagtgtaaagaagaggaggctgtggtcttgtaaccctgtgaagttaataacatgtgaatacctgttaaagttccatgaatcacgtggagataaagttatcgtattctcagataatttgttcgcactgctgcacgcagccaaattgctaaataggcccttcatctacggtaaagtcagctcagcggaaagaattataattttaaataagttcaaggtttgttcatatatttccaaataattgataacagaatgagactactttcaacacgatttttttgtcgaaagtcggtgataacgctcttgatataccatgtgcaaatgtggtcatacagatatcattcaacttcgcctcaaggtagaattgaaatactataaaaatacttaggcgccaggaggcacaaagactaggaagaattttgaggcctaaatctaagactgacgaacatggattcaatgccttcttctacagtttagtaagcaaagatactcaggagatggtatttgcagataagaggcaacaattcatcatagaccaggtattctatttcaattattcgattcaattcatttattcgattcaatttacttatttaatttatttgatttgtttaatttatttggattgtttaatttatttttagggatatgcctacaacgttacaagttcttcaactattgttaaggatacgagtaatttgatgtacagtaagccaagtatacagcaggagctgctccaggatatcatcacatccgctgaagatgtcgatgatgaggaagaggttaatccaactgatttattcacacctacgaatgaaagctcattacaaatgtcagtatcccagaaaaaaacaggccttgcttcactttcaggatcacttaaaaatcaactacagtacaaacacctccttccgccctccgaaaaaccagccaaaaagtccaaggcctcctcagaacagcatccattttttaagaaattatactccaccaaataattttaatttttcactttctgtaatatagttcaaatgtacaatgtatacatgttccttaatccaaggaattttatttttgggacttccctaagattcaactctactaatgtttcgcaaataaggtttttaaataaaagacttatcgcaaagccgttttctacactttcagaccaatgttcgacagatttggatcgaattaggtcaaacctctcctcacttcatgacgacttaacattcctggcctcttcaaccataaaatctgtaaatttacattttacttaaaatataataaactttagggttgccagaacctggaacttaagtacaaggatccctcgaatttatccctgaactcgaggttgtcttccatgaccaaatgcggctccgagatagagaaggttgtatataatatactggataacagagttcgatacaacatggtagcgattctcacaaaatttcattaatgtgttaacttaggcaaggagtagaaaggtggctaaggattccaactacaagtttgggattctgggtgtatcacttatttgtgtttttggctcactttctatttctctgcaccctttatttctccttgtaagttaaatttatgaagtaattttcaagggttgtgggatcggagcttacttttacagggtcgtttacagacagtctagactacgtaaaggtatcatataataacttataaatatattacagtgactaatgacaatctagaaaccttaataagtgagaatcgcctgaataagcagaaactgtcatttttgataaaattaatgctataccagcttggaaatttggagaaggacttgacactatcatctccttccagccctggaccttgaaaaatacactgtggctgcacagaatgacactgacaggaatacaaaggggtgttccactatcatattcttgactttatctttaaggattcttccgtttaaaataaatttctcaaacatgtccattttagagtagtctatagggaagtcagagttatactttgcaagttccaggaggtagcttacatttatgtcatattttttattttcttcgagttcaggatcaatcaactcccctctacttgccggcacagacatatttagcaccttggttgcgttttcaagattgattagttctacagttatgtcttccggaacttgaatctgcctcaattttgcattctcatacctctcactgatgtcctgagatgatagatgcttagtcatgaatgtctcctccagaccatatccatgtttcttgtagtattctcttgtcccaattccagctataattgccattttccagagacctaaattaatgtaatcaatgttaactaagaatttaattagtaagatgaatattatattagttaatgaatattatattagatgaatttaattagttgatgaatatcatattagttgatgaatatcattggtgttgaatgttgtaattacctcgatatgctgtgattatttctgcggccaaaattaaattggacccaatgcctctgtgctgtgaaggctcgtttacatcaagtttttctccatgagccacgacaattcctgaatttaaaattagatattttatcgtaattgtgataaatagcttaccgtagacgtgtaattctctgatgagacctgaacctatcaaagacttgaatttagtgattttcttatcataagttctgttattgcttattctaagtctcaggaaaccgtatattatactcctagactcattttcgtagcttagaaagtactcagtcccacccttagtctcgtactcacgaactattaaaactggaatccctatactagattccttaacttccctgcatcgtatacaattacacaccaggcctagcttcttcatctgattatgtatcaactgcctcatgttagttaagtttgttcctgcgattattgacgggttaggtatatcccttattaccctgtttaatcttatccatggatgcacagctctttttactctgattatcaagttagttaggagattggagtcaacatcaaagtaggggatatacttgccctccttgtgccatttttcaatttctgaaaacggagtgacttcgcagggataaatcttccactggtcaacttggaggtccttacttgacaggatgtacttaaacatctccaaatcctcctgagggttactggaagggaggtcgggcatgatatgaatatcaactttaaagcagttttccttcaacaggtaaatagcttttattgaatcttgtgttgtatggcctctgtttacatattccaaaatcgagtcgtttgtatgttgtattcccaattggactctcgtgcatccaaacctcctcaggagttctatttccgtaggatttattctatcaggcctggtttcaagtgttaaacctatgattctacacttgctgttctcatttaaggtttgttcgtagtctatagtccctctttctctgcacttttgtaaattctcgggatatacattggctgcataaaataagtccctgataaactcctcctggtagctccttggatagccactccatgtgcctccaaggactatgatttcaattttatccaccacatgtccgtttttataaagtgtgtttgctctgtcataaaactgcttaactgcatcaaaatcattttggtttgctctaagcactgctggctcagtagaaagataacttcttggctgaccaggttcatttggacagtagtaacaattttcggagcagctgaacgttcccggacttgtcatcactgtaattaccacgactcctgaattggaccttatagctttattcctcaataggtgcttaagtttactcccaaccatgagctttttcgagggtgtttcgtctccttcataatctaatgtgacagtttgattatctgattcatgtttaccatttgcgttattatgttcaggtttacggttatccacttcatcttcaactctattatcctggtccaaagttaaacactgtagtgattcgagcctttcaaaaatttcacgttttgaaggagcgagtttgtattttcttctaagtttggacataactacattcaagtcttcgttttgcatatcatcgtagtagctgtcaattaggtcaaacaggaatttgtcaagctgggtcatctccttcacatctatgttcaaaagagtatctcgatatctatcaaagttaagcctagagaatgtaaaatcctggggagttactccttctttcagctcgaactttttttcaaactcactccactgatccattgactttgcaaaggattccaaatgtctcctcctgtgataatcttcaaagtcaagtctcgttactctcttcacatctccagcgacctttttaaaccctgaccttgtcgctgtaaaaaagttcttcatctcctcactactgtcagattcagcatcctctgatagattaccacggtcttcattatcgaattgttcctctaggttattggtagaattgtcattttcaggaacagaatcatgaagattttcagaggaagattcattgtttgaatctgagcttggttcggaaccttttttatttggtgaaaaatcttcatctgtctcaaaatcatccatttttgtatctttataactcagttataaattttatctaaataatttacaaagttctacaatcatcgtagttataaagaaattattatccatttaaaatacttaataaataaaggtatttccaaagttcactaatttacaaaaatttatcataataataactattttgtggagaattccgtttatactttacactatattgatttttctcagtttaacaaacccattttcacaattttaattactattcatgatttattatacacccaaatatataagtggtcctctcaattctatgttaatacatggaaataaaggatgattcgtcaaagaatggcagtggaatcttggagcaactggagcatcaagtgaagttaaaaataaatactataaagggtttactagatttaaggtcagacaagccaaatgagaaatataaagaggtttttgaagaggttttcagggtcttctctgaggtcaatgatctcgtcgacacacttactgctaaggtcgagaatgagaaactgtttgtaaaatatataagtcacatattagcgtcaaatgaactgcaactgggaaatttaaaaaaattgtccgaaattataaacgatacagaaattcatccagaatcattcaaacaggatgtgccatctgagattccaaatcaaaagaatactctcggaaacagctctaagaaagtatattctaataaaaatctagttccaagacccatgaagaccatcaaacctccaatttttaaaaataaaaatgaaaaggaaacaagatatggcgttttcaaaagggtgtgaagtttttcacaatttgaccataaaatgtaaatatatttaaattacaagatggattttaatagaataataaatgtgtttgataacatttataaaataaattacaagtatatatctaaggatgtgcagtcactgtgatatcacagttgataaataaattatccaatttataatgatttaaaatattgttgaataatgctttgatttaaaatgtatttatacatattttggaggagattcctcaccctgaccctgcatgtgtttttaatatacatgtcccctttaggggttaatatacctaaaaaatatcaagtacacaaaagttgccacttataaggggtgtcgcagagaggtgccacttaaaggctgctttttgttcaaaagttgccagttaaccctacatgtgacacttaacgtagaaacttattttcttatgtggcgtatttccctaagtgacacctactaccccagttgaccgtaccaatttaattcactagttaatgtacacataatatatatttcgacatttcagtgaaagtttttaaagtctctcgctagtattgaattttattatccgatacttaccttcgttttctaacatattttgccgttgaattgtctcgaatttcgttaccagattccacagcaaaatatcaaaattttcaaagaatcgttccaagcccagaacacattttgtattaatttataaagtattgttttatttgtagaatagatttaaagatgacaggaccagcaattggaattgacttgggtaccacatactcctgtgtggcggtatacaaggacaataacgtagaaatcatcccaaatgaccagggaaacaggacaacgccgtcctacgtcgcattcactgacaccgaaagattaatcggtgacgcagcaaaaaaccaagaagcccgtaacccagaaaacacaattttcgacgccaagaggctcattggcaggaagtttgacgacagaacagtccaggaggacatgaagcactggccattcaaagttaccaacggaccaaacggaaagccgaacattgaagtgaccttccaaggtgaaaagaagaccttccacgcagaggagatatcctccatggtccttaccaagatgaaggaaatagccgaagcctttttgggaaagagcgtcaaggacgtcgtcatcaccgttccagcctacttcaacgactctcaaagacaagcaaccaaggacgccggaaccatagccggactcaatgtcatgaggatcatcaacgagccaactgcagcagccatagcctacggtttagataagaagggcggcggtgagaagaacgttttaatattcgatttgggtggtggtaccttcgatgttagcatattgaccatagaagatggtatcttcgaagtcaaggccacagcaggtgatactcacttgggtggagaagactttgacaacctcttggtcgagcactgtgtccgcgacttcatgcgcttgaacaatggaaagaacatctcatcaaacaagagagctctaaggagactaaggacccactgtgaacgtgcaaagagagtactctcaagctcaacccaggccaccattgaactcgactctctatacgagggcattgactacaacaccaccattagcagggcaaggttcgaggagctctgtaacgagaagttcagaagcacactggttccagttgagaaggcacttgagtcctcaggacttgacaagagaagcatccacgaagtcgtgttagtcggtggaagtaccagaattcccaagatccaaaccctcatcaagaacttcttcaacggaaaggagccatgcaggtcaatcaacccagacgaagcagttgcctacggtgcagcagtccaagccgccatcttgtctggaaaccagtctgagaagatccaggaattgctcctgttggatgtcgctccattgtcgcttggtttggaaaccgcaggtggtgttatgactgtcttgatcaagagaaacacaaccatcccaaccaagaagaaccaaatcttcacaaccaacgaggataggcaagaaggtgttttgattcaggtgtttgaaggtgaacgtgcaatgaccaaggacaacaacttgctcggaaagttccacctaacaggaatcgctcccgctccaagaggtgttcctcaaattgaagtcaccttcgacattgacgcaaatggtatcttgaacgtcaccgccatggacaagtcgactggaaagtcggaacacgtcaccatcaccaacgacaagggccgcttgagccaggaagaaattgacagaatggttgaggaggctgagaagtacaaggaggaggacgagaagcgcaggaagtgcgttgagagcaaacataagcttgaaaactactgctacagcatgaagaacaccctcagtgaggaccaggttaagcagaagctgggcgccgacgaagttgacaacgcactcaacacaatcaccgaagcactcaaatgggttgaaaccaaccagttagccgaacacgacgaatttgaagacaagctcaaacacgttgaaggcgtatgcaacccactggtgaccaagctctaccaatcaggcggagcaccaggcgccggaccagacatgggcgctgggttcccaggcggagcccctccaccctcctcatcctcaggaccaactgttgaggaggtggactaagcgcattatctcttactcattttatcacttatatgcaaaagaaaatgtaatggtagtaactaatctattaataaaaatatacgcttacatattttatatgcttttgtagagattatttaagtttagtttaaattataggaggtatcctataaagtagagaatttagggaattgtgtgtaatttacaagataaaatcacttaaaattgccgtagcaattagaaaaatctatgaaaatcacaaattgcgaaattattacaaagtgacaatattgagtacaaaatttagaaaattaatctaggaagagccgctgggtgtcgttcttgtcaaaggtaatcttacactgaggacacttgcgattgcgggtcttgatgctgttggcgaggcagtcgtggcagaaaacgtggccgcacttggtgatgacgtggtccctgaagttctcagagcagacagtgcaggtcatcctgcgcctgagaatggtgttttcctgctcaatgacgttctcaacctcgcccatggtggactcgagactggaggaacgagtgacgccagtgcggacggaagctaagtagtcctgaagcgccttctgggaacggcagctcttgcggtactgagactgaagctcgcaaacagcggaaacagcaacgtcgcgctggtgctgcaagtaaacgccgcgattaaaagcggaagaccaactgcgcttatagtcctgaagcaaggtctcgaggatttctagcttcttggagttcaacgcgaccttggcattggtgttttcaacaagttggttgtaccggtttactaagttggcgtgagagtcctgaagtcgctccaaaatcttccgagtatcggaagcctcattaatttgacgcattaggtcatcgcacatccgctgcttcttctcaaaggcggaactcacgtcctcaagctcttcactaatgtttagcaggtgctccttgtaaaaatcaagctcgttttcagcggaggatttggaatctaaatttttatcacaggaggatttgggatctaaattcttatcacaggaggatttagaatctaaatttttatcacaggaggatttgggatctaaattcttatcacaggaggatttagaatctaaatttttatcaccggaggatttagaatctaaatttttatcacaggtagagttgagagcgttggtggtggaggatttctcagttgtagagcagatagatttacaaatggaggcattttgatgaagaagtttggtcatcttggtctcgaggctcttgagttcagagaccatcttctctcgctcgtttttgtactggtccagctcctcggaaacgatgctgtagttctccctcaaaaacgcaagctccttagaatccttgttgtactgagactcaaatgaggaaaccttctgactgatctcactgacaaatttctcaaaatcatgcttcatcttcatcacctggtttgaaggaccttcagtaaggctagaaatcttgttcctcaggtcagaattatccgactccagtctggagatttctttatccatgttcctggcatagttaaacagcctcgagtagagggaagagccgaggatcatctcctcggtgacctcctcaacattttcaacaactttgacagtgtcgttatcggaatcgctagaggaggatagctccgactccttcttgccatcgtggcctgtgaaagtcctcagctcaaactttaaaaaggcgacttgcttgctaagtctggagagctcgattctgttagtgttacacttagtctttagagctttgtaccgattatgcaaaatgaaaaataacttacagtaattgagacaattatattttaaaatgtttatgaaacctgcgtctgtagagcaggatttatgagtgcagttttttagggatctgaggagggcgttttttttcgactcgaaaaggtgtattttggtattcaaaaatgagtctctagcttcactccactcaaactcatcgtagtggtctgacagaattaaaaactcgtcactatcaaagatataatctaactctttaaaatcaacatcaccgtcaggatctccaggtgatatggatgggaaattagtgctgatcattttttcccaaaagtcacttgcaggagtaccgtttgagtctgttttcccgtgtttttctcccgaatctgacaattcaccttcagatacctgtcgggatatataaatatcaatatctgagttcagagaatcccaaagcgaggagactgactccatcagatgctctagaaggtcatttttcctcgagagaattacattattgcgatttagtgcctcgttatccttgcgatactgttccaaagtcttgtaaagctgatgattattttgttcgtagagcgttagattctgaaataatgatgtggaggagcttggaacttacgtttaagggtagttctttgtccgagggggacacatcaactttagagcgcttcttcaaagccatggttcgcctgaaaacgtcagaccttctcaatcttccagtaatcctgcctaatttgcgtccttcggtgtaccattattaaaaacaagcaaaaatcatatttatacaaataattagagaataaatgtgcgataaaattaaaatttaaaaactgaattagatgtggtgcttgaatgtaaaaaataaccaagcaacgaggattatccagagcaaaaaaacttgcaaaacaaagactgcgcccttatctttctagtaaatcggctcgatcctgttatggagttttctcagcaatttcctggccagataatagctgggatccagcgttccctcgatcacccattggttagaactcgcatctgagtacttggagacaatcaccttgtcatttatcactgccgagcctgctaccatgctgacggagttgggtatacagtcatccagaaactttgcgtagtctgacatgctaacatctcctaccaggagcgttgagtctacgcttttttttacttttacggttttcccggctgtttcagaattttccgcatcctctaccactaactctaatttagatttcctgctactatcgtcggaccagaacgtgtgacagccgagaacatttgtttttggagggtcctgctgtgattcctcaacacatgtcagtttcgccacgatttggcagcttttcactctgttatttttatatttccactgttctattgaatttaacaccgagtttatgctctggtaatttccagattttcttctcacgatttccgtcgggggcggcctgttgaaaaaattccgaaccgccttcaacaggttcaaattcagtaaaactggaaagttattgaaatttaagtcaacggacactagggacttgaggctctggttattttccaaattctcattttctggctcattttttaccaacttgtttccgtagaaggagtggagcttacacctcagtaacttagacagatacttttcacttacaaacgacgactctgacgtcggtatcaacacagcgttcctaataaacattaaattcaccaccgacacaaacaaatattttttccacaaacatacaaattattaaatataaataataatgaataatggtgtaaatttgaatgaggaaacttgtaaggtggaaatattttctatgtaagataatataccttggttgtatgcgatatagaaggcttggcatttgcggttcttttaatgtgttagacaggctgtttactaggcaaatgtcagatttgacacagaatgggaactttttagtcatgaactctgatttcgggcaagcttcgtctgtgttatccatatcaaatagtttatttttcgggtcatccaagtactttctgtaataatcgtccaattgtgagttttcactttgttcctgtggattatattcagacacgaattcgccgtcgtatgctggcagttctgcatacccatacgggtttgcagggtccgccagtaaatcattaaacggtaatccatagtcttgaatattcttagaatccagttccgaattttgcacattcatctaaacaaatttggttgttaccgacttacgtgaaactgggcctgtcctgataaattagagtaattctgaaggtatacatcatctccagactgatccttttccacctcttctacttccaaatctaacacattatctactcaccacttggtaaatattacttaaaatattttaatatcaaacgatttataatatcaaacgatttatagtatcaaacgatttatagtatcaaactatttaatatatatttattcgagcttatctacaaaagttaccttgtttatcttcatgtttgtagtttaaattaatttgtagtttatattgaggatggaacccgctcttggttctgttgtaaacatacttagttactgactcgttaggtgctgtgagtactactaagttcttgtagtaagaagaaatagccaggaacagaaagttagagaacccgaaatccacgttagacgtcgttgatatgaacacagttggtctgaacctatactttgacagctggcccagtgaggtgataatttcaatgtgattgaggtccatcaggggattccaaagagtcttgataaagttgtggaaaatactcgttttcatgtattccaggcatgttcctatgaataacagcagtttatcagcgattggtgaggctagaactattttaaattgcgatagttgcgatgtagcccaaatcatattcaagtgtattaagaggttaattaatgtataatcaacatccattgggaacaaaatgttacctcccttggttagagttgtaaagagcatatccactaaactgttgatgtcttcacacacacgaactcctctaggatcagtaacatgctttggggtttcaacatcttcatggctgaggactagcagttctggtctgaggatatcgttaatgttcgctccgtttaacaaagtgcccgtgtatattcttattttgtctccgcaaattaccgtgttatatccaactgaaatcttccaaattgctcctcctacggagtatccattgttcacggcacagaaacatgatttaacatcaagattctgaaacttcttcagatggcagaatgtctcactatatctcagtttcacacaatttgcatctaaaagttccaaatcatccatactgtaatatccgaaattagcagtaaatgttacattttctaacacatctattaaggaagctctcatgaatttatatgttccttctgtacacagtatcttaggcgacttcccctttgattctgctaggaatctggatgtcaaccataacagggcgcctgaatgtacaaagtcgccatcagttattagtatgacatcgacattctgagcgtgactacagtgaagattagggcaatattaactcacctcttatataggtttagtttctcttcactgaaatctaacgaccagccgcagtttaataaaacatttaaaaaattatctttatcgtaatttccatctttatcttggattttaaaggaaattttagttgctagtaatccgccgtggattagcggttccacgttcactaaattcatatttagttaatattttaaaatacattcaggaaaatttcacccgtttaatatataaactaaaaaatacatagtgttgaaatatcggtaggtattatgaatcatacactgtgtagggcattaaacatataaattaaaaatgaaaaaattaaaatattctcgccacatataatacattttgaaatattaaactaaatattaagagaggtgtttagtttctttagaataaattgttgtctgttgtacagaaccctttgattcttggcaatagaagccacattgtccagaatctccttatttgaagtaataatacatggtacggaaaacggcaaaaaactcgtaggtaacatatttccgctaaataacatggtatcaaaactttgtaaactagagtccagtttcagagttaagaaaccactatccttgcaatcccgcatcattctgttagtcatgtattcctccttttcaggatccatctcagtttccaaagtcactaaaatcacaattttattaaatcctcttgaaattttcggtataatttcaattttattagaggccagaggatgctcaaaaaaggcattataaaccgttgtttcgacaacatttacactctttatattcatacttttttcattttctaccttttctaatgttattagactaccaaatcttttctttttcagaacatcgtcgtctctaagtgacatgttattagtgttatattctgatttgttaaagaactctagactcccattcttcacatttttatacgtgtatttgtatatatatttatatacagaatcgccaaagcatttctcatagttagatgctgttccagattgaggtagataggaaacatgagcaaagatagaaagagctccggaaaaaaatgtattattgtacaagttataagaaactttgaaactgcctctgatttttaatatattgttactctcagttggaggtactaggacaattttttgtaaatcattttccatagttggatccatataattagtcattaccgaacctgttataggaattggcgataaaagataagatgaaactattaatcctaggataaaaatacacaaatacatcagtgcgagaaacaacaaaccaaacaaaagacgaaagaattttcctaaaacataatgagtaaataaatcatacttgataaacctcttctaggtttctgttttccacctgtaatggagtttaataaattagtttccagctcagggaactcattaagaatatcctgaataagtaagatttttctacaaatcggatcatcgatgtctatttctttcgtcttatttttatataaaggctggagtaattctaacttagttttagtcagttctctgcgataagatggccccgtactattatcactttcttcatcactttcttcgtcacttcttccataattatcatcactttcttcgtcacttctataattatggtttcttctataatgttcagttctgtattctttatgataatcttcttctgaatctagaaatgaaacggttctttcggccattttgttaaaaatgtgtatgacagaagattgatcgagttacggtagtcatttagtcacacatttaatatgtgttacaacaaaattaaaacagtataaatattacatatattacgacataatactgtctacaaaacaaaatacaggatatgctaatatatcttttattcattccccatcaattataacataaacgatttactaataaaaatcgatataatatacaaatgtgtaaataaaattatgatatttattttgaagagaatattctcactgttggtaatttcaaataaggaactgggaaatcagtcgtggttcgatttagttttaagggatgtcataggaagaaatgaggatgaaagcgtagaatctagcagtgattcctctaattcgccatgattttttaattctcatttttaatacataatttaaactcatatgtgttaacgttttattaaatgtgtaatatcaaaaaattatatataaattattttaacttatttataattcattacattttataaatattaattatatattttaaagattatttaaaatttgaaagttatattatttatgcgtttccaataattatttacccacacgatgttttcatgacttacttattattgttttttgttttaaatgtctaactcataacatattgaaaaaaatgaataaataaaaatgactacgataaattcgctggagattcggggaatccgatcattcacaccttatagaaccgaattccttgagtttgaaaagcctttgacactcattgttggtaaaaatggctctggaaaaacagtatgaaattataattcataagtttatctttagactctggttgaatccttgaaggcagttacgtcgggaatattaccaccagggcagtctaaaggaagaacttttctgttcaacaataaactgaacaaatcctcagaagttaaagcctcaattaaaatcacattcaatacacacaccaacgagactgtgagatcacgtttaattattgaatttaggtctcagcgtcaaggtcatactcagttacaactgataaagttgaccctaaaaaactaactttcaaggttagtaatttttatctaacttgtttagggaactgagaatgtactcaatgtcatagctcaagatgggaaagtaagttcaattcctttaaaactctttagaaaaagagcttggcattgaagactacagatatggatatggcagtcccgttactgatgggcatgtcaaaagcattgttagataatggtacgacttttaaataattgaatgtgtagtcatattctgtcaccaagatgaaaataactggccacttgatgatccaagtaaaatcaagtcaagattcgatgatttgttggagacgtcaaggtaaacataaggctttacaatgttttagatatacaaaggcgttacaatcgatccaaagagcaaagtgagaaaaaaatttaatacccttttagaagagaacaagaagatatgattatactaaaaaagtccaaattagacgcttacaagtcacaaattctacaagtaacaaaattttttctataatttttagatagctgatctcaagaagcagttggaaacgagtagacaggaaatatccaaaacaaaggctgaaatagagtagtccaccaaatacttatattattctagtttgacgcaaaaacacttgagccttatgaatgaacgaatgttgtcaaagaagaaagagtttgaggaatcttcgtctaaatttaacgaatactgtgatgccgaattgacatatcagaggtaaaaaatgatttaacacagttttcagacttaaaaaggaatttgacacaatgcatgaacagttatctgagatatatgaagagccactggaccagattcggggatattataccgcattgtctaatgaacttgaggtatacaaaagtaataatattagtcgtagatttctgaagttaaaggtgcaaacttggctaagtccgtcgaattaatgtcagtgagcctcagtgaacaacatgaaaaattaagaaaaatcaattcacacgtaggatttacactggtttacaatgagtaggagggcaatttgatagtctggagggaaaagtattcatcaaattccaagagaataactgaaattacaagtgaaatttcacaagaatttgccataaaactggaggatttagatgaggagactatccagtacgttgattcggaaatatagttcaacaggctaaaaatcgactcgttatttgtgccaacagttgatgaaaatattttaaacgaggagacccaaaatttggaaaatgaactaaagaaactacaagcatcacttctaaacaccactggtaataataacttaattgaaaaattttaggcaaaatagctgcatttaatgttatgttgaaaacagtgaccacagagcttaaggaacatgaatcagtagcgtccgaggttcaccataataaacacatttgtttacagtttgaaacagttaatcaacataaaaataacttaaataaagacctggaaactcttggtgaagatataaaaacactagaaaatcaattaaacggtaatttaaattaattcacatacggattagatttgtatatgaagaaggaagacatgttatgtaaagggtttagaatgaagaacatgataatgatcaaaactgatatcaacaaagaggagatcacctcagccatcaagtttctaaactacatactagccaacgactcgaaacacgtggagtcttataacaaggtgctcaacagtttgaatctgggtaagctaaccttcttttaacgaataatttagacgaaaacaaactcatccaagctgttaaaaggtgatcaatattatttctaaacttttatttattattttaggatatttgatgagttgtttattaatgacgataaggtattaaaggacatctacgacgctgttaacagattatacaagtcatcaagtaatcaaatacataacaatattgttaaatattaatgaattttagaaattaaggcgtcgtgtggaaaatgtggaactgtaagacttaatagtaaaatagtttgattaggaggttgagttgttgctgactgacatgtcatttgagccatacaacgagttaataagaatattaacaaataacagaataaaagagtatataaaatattttgaaaaggttttaaccgatgacaaagatcaagggtaaggtcacagtgttgaaaatgtttcagagatgacggtttcgagattaatgagtataacatgatattacacgacataacaactttgaagcagaatttattaaacaaaaagtatcaaaattataaaataattaattttaggactgccgttgaagtgaagaccaaagatttacagcaaaccttgattagactggagaaaatttccgaggccaccactaaacttgccaagtcaagagatgagcaagcgtttatcatagccgaaaaagataaaatcacaactgaaaccattgagtaatttttgccaagttattaattctcagactccaaacgcatgtggatagtgttaacaataaactgagacagaataaatcagatttgaatacactgcaaaacacacgaaacttaaagtataccaagtttaaaaggtaaatacacgttggaaaaaatattttagtatgtttgacgagttgctcagtctgaatgaaattaacaaggagatacaattgagaattaacgaatgtccaacaaacatctcacaaaaaatcaaaacactacaccaaatcatagaccgactcgtataattataacttacgtaatattaattagaatgaaggcctcaaggccactaaggataaacaaactgctctactaaatgaactgaaggaaaaaaggagattatacgaactcctggtggaaaatataacttacaaggaacatgaacagacactactcgaaagtcaatcacgtctcgaacaactaaaatccgaactcagtaccttattatccactattattcacaattactcacaattactcactattattcactattagttacaattaatgaatgtttaaggtggtaaggacgtgaaggagattagggctgattatgataaaatagtagccgagtgttcggcactatcgcataaaatgtaccttcacaaaaactaaaatatattcagtgcgactttgaatggaatgttaatatcgagagaggagaacgcggcaaagttcacggagactttaaacagtgccatatacactaaggcgcagtctcagtacatggaaacgtatatagaattaaagtcgcacatagtggcgaaaacggtaaccatttttaaactaagttgattcaggacttggataaatattacaaatacctcgaatcctcactacacaactatcacctagacaaggtaaactattcacaaagtgttgtaatttttagataaatcatataaactcgtctttaaagaggatttggagggaagtttacaccggaacacacatcgactatatccaaagtaattaattttcccaacaccaaatattatacgtttaacactgttaattagtacaatcgaaggtggataaggatgttttacccactgaaatatcatcacattcctacagttacaggtttgtccacactacctaccatttccattagagttgtaatggtgacacccagtggagtggaactggatatgaagggacactgctcagctggtgaacgaattctgtcatcattggttgtgaggatggcactcatcgagtgtttcagcgcccattgcacaatcctagcactagatgaacccaccaccaacttagaccgtgataacatccaagtatctatagagttgatataaaattattttatagtcattttataggctaattgtgcattgtgaatgttgtttagagtctggagaattcactgagtaggttggtgaacgagtcgagcatgaacttccaactcatgatcataacccatgacgaagcgtttgcgaacaaaatggcaactctgtgctcctgcgacaagtacatcaaacttgaaaaaaacgacaccttcacaaaaatccgaaccataagattttaacactattacacatatattacacatatgtatatacaagtatatttatatgtatatacaagtatagttatatgtgtcgtagtagattacactaacaatttgtacattagaatattgtttggagtaatctcaggcgtctttgagggttcttactgagtttggtgatttacagtcaaatctagtgattttacgattagaaaacttctcaggcttaattttgggtttaagggattcagaagaggaaggttctgaggatttatcagtagaaatggacgactttgtggccagttttttgtttatcatgtctctgatttcaagaactttggctattttccctttaatgtcatctgagtaagattgagattcaggcgatttacgctttgaaattgtgtgtttagaatactcaatcctgcaacacataaattaatattaacaaacgttaaaatgtgatgtcgaactgagactccacttaaactaacagcaacacgagcttcatcaagagtagtgaattctattactgaggagtttgcggatcctctgggtgatttggttaacacacagttgacaattttaccaacgttggcaaatagtatttgtatgtcagattcatcaaactgaggaaaattaactaaacttaatataaacttacaatggctggaaggttcgaaacttgtactgttttctccaatttatcatctaaagtgccaggagaatctgatgtcatctgagttacacagtttagctaaaatctgatactttacaaccagagactcccagaaccatgataaaatagtagaaataaatatcatagtaaaatgatttaaaatattcaatttacaggattgaattccccatggaaggagtaacaagtaaagttaacgacattaaatgactaacaagtcaacttcaacggtataaatgagaaatttcaagggtataaatgagaaatttcaagggtataaatgagaaatttcaagggtataaatgagaaatttcaagggtataaatgagaaatttcaagggtataaatgaattaattcaggggtaaggtatttaagaattgggaaactccttaagggcatgttcatgtgtatacatttttgccattgatttgtatcctatgaggtctccatatctgaccagattcccagcatcacagtttaaaggactgtcagggttaggtgtagaaagtatgtaaatcacgcctctacaaagatactggatcgtccaagcgggactccaatttgacttcaaaatatcaatacacagttctcctacaattaaattaattgttaaataatcaaattaattaaattaatgtaaaattgggataccggtttgaaaattaatgtttggatgaaagcatttggtggcgaaatgaacggttggaggttgtatgggataagaattcgggcaatgaattaagagtttaaaaatcccagactaaacgtgaatgactgtgttaaaagtacctcgaacggagtcccttctggtcctctgatatacgcagtccagttaaatatattcgaggcactagaaatattaatgcaattaacgaacttacgaaacgtgtagtttaatgtttgggtcatccatcttggacgcctcttttaactctttaattagtctacctctggccagagacatattatctaacttagattaatatattagcttaaaaattccataattcggattaaacgggtttattatttagagactccctgacgcattccaaatggtcaactaaattcaaaaaatttaaaaataccaaggagtaaatggattaataaataaaattttaaaaaattaagtttacggtacctagatttctgaattctatttcatttttactgattattctttttgccgtatattttgaatcctgcgcgtttatgaggataattaaatatatttattggaatcttgactgtttcactattttaacatttattacatttattaacacttttattcgcctggctctcctgtaaacctcgtcctccttgtgtaaatcactcagcgcatttttaaccatatataaaactcattaatccattattagaatatttaatagtaattatttatatatgtagaaactagttttagagccattatatgtcttcttcttagaacttccgagaacttaataatcgtactatctctacatattaatttattcattaaatcattactttatcatttatttccaaatttttttacttaattttatgaaattcggatgtattattaatgtcaaggttatggaatatattcattgtggaatgtagaggaattttctcacctgagaaattcctctccgttacttactcaaattaagaaatttaagataaaaaatataatttcaagtgtagaataaattaaataaccaaatgtcagagcttatgtgtaatgctacgtaaatatattaaatatactaagcgattcaaagactaagaataaagaatattaattattttagtgggattaatttaagaatttgtggaatttggaaataaagtttatattttttatttacttgattttgttactgaatccacatcacactacattcctaatttcttctaatttctaaaatctgtatcatttatttgtaactttaatctctatcatgggtaataatttaacagttttttggataaatctttgaaaatattttatttctaatgtacaatattttctcaacgcctctagagatgatgaacatattttaagaggctttaaatgtaaacagatctggaaattaagaattaaaatgttaattaaatgtaagactaaaggaacgcgggtgaagggtgttgtgtttcatccacgccttcactttctgctggcctctatgcactctggagatatccagatgtgggattacttaaactctacgttagtggaagttttctcagaacacgaggggccggtaagaggcatagacttccaccaggaacagccgctttttgtcagtggcggagacgacacaacggtgatcgtatgggactttacacagagaaagaagttattcgtcctctctgggcatttggattatgtcagaactgtgcaatttcacaccagttacccgtgggtaatgtcttcctcagatgaccagactataaggatctggaactggcaatcgagaagttgtataacagtaatttccggccacaatcactacgtaatgagttcactgtttcatcctacggagaatttaattatctcctcaagtctagaccacacggcgaggatttgggacattacctacctagtggagaagaaatgctcaattaagcctccagttcagagtcagagtaacttttacatgggtgaggctggcaccatgggaaacacatttgaaattgaagtcacaggcgtttcagacgttatttgccttcacactctggtaggccactcgagtggcgttaactacgccattttcttcggaactaacctggcaataacagcgggagacgactgcacagtcagagtttggagatattcacaatattccttttatcaaactaatatcctacgagaccacgaggataatgtcacatgtctactgctggttaaggattatttactgagcacttctgaggaccactcgattagaatttgggacctcaacacctacgccctagtacacacttatttaatggacgatgacagattttggacaatatccaagtctaagcataataattatatcactgcggggcatgacgccgggttgattgtgttcaagttgtataaggagcggccactgatcgccctgggaccagctagggaaaaatcaatcctctactacgtctggaataataatttatacgccagtaatttggaaaaggagtgtgaatcttttaataaagagttgttacaatgttctggcgctaatggaaccaatgttaaaactaaggagccggatatgaatttgttatactacaaatggcttgaaagtaatagtaacaacaacttggtaagtaactaccacgaccatgagaataagctggtgttccagtgtccaagcggtaattacataagccagcgtacgctggtgggaacagtctcggaggagaggagaatagtccaggcctcaaagttattcctaaacaactattccaaggacaggatcgtactctgtttgctgtataaaattaataaaaccagttacattgaactgttctcataccacagaggacagctggagtattcatttaaaagactctgcaactcagccgctttcattaactctaaccagatcctcgtcgttgataagacgctcctaatttataatatcaacggcgatctaatctccgaacttaacatttcaaccaatttgtccaatgcatcatcaaatttgtcatcacatagtcaaatgtcatcaaatttacaacagaatttgtcaaattcgtcaaatatgtcaaatgtgtcaaatgtgtcaaatgtgtcaaatgtatcaaatgtgtcacagcagttgtcccagaaccaatctcactccgtaacgtctttcctggacaaagatttgaataatttaaaggtctttagtgtgagtctggatgttttattatttttctgtccgaagaatcagttgttgtgtctgtataacgtgagttccaggagccagatcaacgtggttaacgcgccgtatggcaagttatttgacgttatcgttaacagctacggcttcatctgctgcctgttcagcaactttgtagtcatctatgaccgcaaactcaatcgcatcacttacaaacaacaattcaacagaatcaaatccggagtctgggaccacaacacagccgtcatctactccacatacaatcaagtaccaattcacactatctcatctgtccatacaattattatatagaattattatatagaattattatatagaataattatatagaataattatatagaacaatacaatactattgataattgtgtagatacattatttgttgataaatggcagttttggagtgttgtgtacgatggcgtcgccgacgtatttgattaaggtgagtgcggtgtctgaggataagcgggttttgtacctgattaacaggcagcacaggtgttttaaacaagttttagactcgccagattacctgctaaagtactcactgctggttaataacatggagaaggctaattcgttagttgattctggccagctgtttggcagattcacgtgctcgtacttgatcaataattgcaagtacggactcgccaggaagttactcaacgatgataatttgaacaagttctacctctccgtacagtttggagaccttcaaaacgcactcaacgacgccaaaattatcaacaacaaggtaattcccaccaaacccttcacccacacatttatttattatatatacaaattatatatacaattttatgtacaattttatatgtaaatgtttaggcgatatggaattacttgggcgatgtatcactggagttaggcaacgtaacaattgcggaactagcataccaaaagtcaaaacaatacaacaaactaacacttctatacctcgtcatcggtatcatcaaatagatttctcagtttacataataaaatataattttcaaatagatttcttattaaaatattttcaaatggatttttaatttacttgaaataattttgaattgatattttaggtgacttggggaagttgagaaagatgttaaacatttgtaaaatacacaacgacaaatcgttgatactagttcacggtaatgataaagtataataaattttatagcactttatttgggcgacatggaagagttgagtaacgtgctgtgtgaaaatggacatgaacagctgtccaacatatgcaacgccacatatcaaatcaataactggaaccacgaacactcagaaaatacaaacgccaaatacctagtaccaccaaaacccatcaacaggtatttcacacatttttacactatttacacattttacacatttttacactatttacacatttacacattcttacacattttacacattttacacatttttacacatttttacacatttttacacctacacacttagttacgtggtttacacattttacacatttttacactatttatagattttacacataattacacacacatttacacattttacacataaatacacgaaaatttaggttggatggtgagatgttgaattgggctgtgaatttcatcgagtctgatgagtcgaaatttgacattaacgaaattgtggagtttaccaggcaggaggcaaagaaatcagactcagcacacccgggaactaatctactcgaacaacaaatggcagacctactcgtaacaccaagaaccgatcataaaccccatcacggagctgatcacgcagttgtatacaccaaaccactacacacacaggatccactgtacactactgatccactatacacacaggatcggttatacacacaggaccaactatacactacagatcctgtgtatactaaggaacgtgagtatacgagacaagtggttagagcagatgagacagatttgtttaatgagattttggagggtacgcaggacttatcaccggttttaaagggcgctgtgaatcacttggatcaatcagatgatatttgggactctgtgcgagatgaggtcccaaatgagcaacggctattcatgttcctgagccagaaaaattatacctcagcacttaactttttgaatcacatgtacggagaagtgaacgcacacctgctaaagtccacactacaaagctccgacttcactcaattccagtcaattcaacaaattaatcatcaaccactactcaaccagaaaatgacaaccgctctaacacatttccaaagtaatcacactctagtcaacttagttccatagttatttccgtagttaccatagttaccatagctatttccatagttactatagttaccatagctatttccatagttactatagttattactataatttctataatacaacgggatataaatttgttagacgctgaatttgggcgttgttgtgactgtttgagtgatttgttgcgtgagttatttttgtacaaatcacttagtttgaatgtttctgggattatggagcgctgttactggtacgctttggcggtaaggcttgagctggagcgcgattccgtgtgtcaagctgaccctaggcgaggtttacagctggcggcgtacctgacctgctgtaaacttaacccgagtcaccagtacttagtgctcaggaaaaccgtaggactcatgtggaaggcaaaaaattaccagactgcggccttactggtggatagaattttaaaattggacacggcagagttcgaattcgaccaggcggaaatggacaaggccaagaagatccacacactctgcctccaaaagggcacgaatttgtacgatttagacttttgcacagaggatttcagtaacctccaaatctgcacagtcacactcgagaaaattcacatggaacccaccgtcacatgcctcttctgcggagcttacgcactcaggaaatacctcaaccagttctgcaaactatgccaaatcctcaaactcctctaataccctctaataacactactttacacaactttatacacgtaatttaagctaatttatgctcaatttataggcgtaatttacagtaatttatcaactttatacccagattatataactttataagggtaatttacagtaatttgtactcaatttataggcgtaatttacagtaatctacagtaatttaagctaatttatcaactttataagggtaatttaaggtaattaatacgtgaaaagtgaatttacatgtaatagattaaatctattggttttaaggtgtaggtttgggtcagtggtaatgcctgaatggcctgagcctgggcgtcttcggtgacacgtaaggcttcagctaaaacatcattaaagcgtgaaagttacattctcattcatgacctcagggacatgcaaattcgggaccaacatcttatttatcaagaaaaatcctacacacccacacatccacacattaatcaaatgaataattagatgaattaatgaataattagatgaattaatgaataattagatgaataaatgaataattaaataattaattagttggatgaacagttggatgaggggattaccttttttggtgtgtcgtccgagaccgacggcgccgaagcctttcttaaagccgataggggcaaatttggcaaggagagggccacggcccttactcgaaccatacctcgcccatacacaaacagacaaaaacataatccatcaacttcaatccctcaatagaattttctcaaacgattattaatcaattatattaatcaaattataatataaattataatagaattgttggaagaattgttggaagaattgttggttgatttttagtgatttgataagaagctgaggacttctctggagtaaatgagtaacattagaagattcttcagtcgaaggcacacgagatacattccgaaaattttaccaaaaataaattaatcaaattataaattagaaattgtaaattagaaactggaaattataaattataaattggaaattggaaattataaattataaattagaaactggaaattagaaattagaaattggaaattggaaattggaaattggaaattggaaattttaaactgaggtttaaatgtgagatataaatatgtcagatgtgtttggaagttgggtaatttgaagtgcctgaaatcctcctccagcataaataaataactttaatataaattcaagagtataaatgaggataaacgtgttttatatttaatatttcctgaaatgaggtttagacaggctggagttgatgtgatttttgaggtcacattgttactacgttagggagcggctggagtttgtaatttccttacacatcagtttcctataatgcagagcgtatttttacacattccaggcctttatagacaaacacaaacggcatgcaggagtgatgtgcatgcgagcaatatcacgatgtgtaagacttacacatcccagaagttatatcttctatttctagtacatgtactctagtctagttaattaataatcttaaactgttctcgtaaaccaggtcaattttcagcttaaaaattgacattcgtagcatactactctagacaatttgtagaaatatttccatacacttatctggtactaggaaacgaattagtacctctctcagctcccggtaatagcttaaatcgacgtagtctgcacccaaggtgcatacggaatttctggcaagtttaggtttcagccaaacatttctttaatgtgtaaattagtctcactcacatttgctccaaatcgtccaactataagtttttaattttttatccttaagccaacggtttcaaggaaaaaatcatcgccaaactgttttaaaaaacataagagcctggtagaaacacccttccagacgctctcagccttaaattactcgtattaaacactcaaaggtttaaaaaacaccgcagaccaaatccccgtaaaatattaaactttcaaccgaatctacaagccaactcagtctcaaacgtagaaaccaaccgaaataatcaaaacaactcaatttaaaatttaatgatttattttaaagtttaatgatttattttaaaatttaatgatttattttgagaaagtatgagaataagtatgagaataggtatgagaataagtatgagaataggttgaggaaattataatgtgttagggaagttgaagaaaagacttcctagagcctctgtatggatgtgtaaagatattaatctcgagtactaaatttgatattaaaaattcgaatgaaaatttaaagtgaggatgaattccgacatgtcccccaccgacgtggtaagagaaggtaaatcggaccccaaggaggattacttcgtgtctggctcagataagccttctgaaggctttaaggaatctggcacagtataccacagagcgtcagattccacactccaaagcctatcctcactagaaactcaagccactcttcaatataactcaagcctaacacactcaaagtctatagattacccctacgatcttgataaaaaaacactctacagtcccttgtattcacagaacccctttgaaaatgaacattacctcagctctgcagattcaaatctcacacactctgcagatcccaatctcattcaacagtcttctatagactctaaacttgttcaacagtcttctgtagatcctaaacttgttcattctgcagattctaagcttgttcattctgcagattctaagcttgttcaacagtcttctgtagactcccaaagttcacaaaatcttacttcccaaagtattaacacacaaaatctcaactcacagaacctcagtacacaaagtattaacacacaaaatgttactacaaatgttagtggacaaaatgttagtgtacagaatgtgaatttcgtgagtcagggtgaggacgagaaattccagcgtgatcttcaggatgctggtgtaaaagactcagtttcaaattatcttaatccggtgtactgtccggagggactagtccagcctcagaacaaggtagttgcggtgaaccctgtgatcttggtagacaaggtggagcgttcactaatagtccagtggtacgaaaactcggtaaaaagagaacagcgaatctcgtataaaaagtacggcaacgctaaggctcagcagagagctgaggggttaataagtaagctcttggccgggtcaacatttgaccagctttacccggaaaaaggcccgccgatcctgacaatatttgagaatgtaggcaagtccatggtctcactcacgagggacaggataatccgtgagtggagagtggactggctgaatagcaacggctcaaaaatgagagccagatggtcctgtaagaaagtcggcaacgaggaagctcggaaaagagcagaaacctttgcgtacagcttaatacaggggacttttaacccacgacttctccacaaagctacggggacgagattgtctaaaaatgacatgaaatacaacgcagtagtgtcgggactcgactcccaaatggactccaaagccatcagtcaactcagcgaatcaaattggcaaaactcagaatccacgacaaagagaagaaccaaaaaaagatccgtcaaaagctccgaacaaaagaaaggcagagccaggaaaagaaatctcaacacctttacagatcccaactcctcaaactcattgaactcagccaacctaaactctaatccctcctccaacttacaatctaatctctcctctaatctccccaatctttccaataatctccaatctggactacagtctggactacagtctggactacaatcgggattgtcaaacgcttttaatgggaatggtggtgagatgtctcagtatatgaaatctcattatccgtacatgggtatggtccaggatcctggattttcgggttattatcctatgtaccaggaggaggagtctggtaagcagttagacccaaacagtgcctacgcaacctcaatgttacagcagaactggatggactggaacactaacatgcagaaggtaatgccctacggccaggagtgggattacacggccaactctgggatggtggattacacggccaattctgggatggtggattacacggccaactctggtatggtagattacccgttttaccagcagccaagttccggcgtagcatccagcagtatgacgtgggacccgttaaactacacaaacctgaacatgtacatacatcaaaacgagttacaaactgggagagaatttgacgaacaagcggagtcaaggctagggaatcaatatttcagctactacccaggcgaccagccctacggattccaagagaacattctcaaccaagaacaaatcatgggatgctactacaactatccaaacaccatcagaatcgaaccaaaccagtggacagaaaataaggagtttactgattataacaaggagttcacagagtacaataaggagttcacagattacaataaggagttcacagagtataacaaggagttcacagagtataacaaggagtacaatgaatataaggatgaggtgaagtgtgaggaggttgagaagggtatgtctcaggtgacgacattggcgaattacaagagcataacgggtacgagtatttgtagtgagttgcctcctcagaacttgtcagtttcgactcggatgtacacgacagaccactacggctacgtgaactcagatttaggcgatgttaagcaggaggactcgaccctaaactacttctcaaatgatctcgaggacccgctccagccacaacccatgacacagacacttaagaaatcagactccacaacgtaccaaaaggataaattcccagaatcttacgatagcgtcacttaccgagatgccgaagatcccgtcaaatactataacatgtgacattttcacttgtaaagtgtaaaatatgaagaattgtgtaaagtgtaaaatagtgtaaaatagtgtaaaaaagtgtaaaatagtgtgaattgaagaactgtgtaaaatatgaagaactgtgtaaaatatgaagaactgtgtaaaatattgtaacactacgcttgagttttttaatttagttttaactttttctgtacattattaaattttttgcacattattaaatgttttttacattattaactttttctgtacattattaagtgttttttgcacattattaagtgatttttccacattattaaatgatttgcacattattaaattttttgtataatatttattaaatgatttgtataatattttagtaatttagcctagggagtattccgatgactagaatttaccaattggaatcttatgttaataaatttacctcattacacatttggcgcttttgtgaatatctccgcctggaaaggaaattcataagatttccgaggatatttgagaggcaaaacccctcaattgtgtcaaaagacgcggtaaacttacatgaccagaacacgggattcacaaacttcctcaaatccctcgattcactcgtaacttccagagaattaactttaaattcatttaattcccttataaataagtttgaaccgtcgatagctgatgatagtgagcatctatcccgggttctagagtcttacagtactgagactctgttactaatgctggattctgtaacttttaaccagtcccacgtgagtaggaattttaacgtgtttttagacaacctcgccaaagtcctctcgaaacgcttttttacccttgaaaatgatcaattcgtcgagaatttaagttatactttcaacatagtaaggagaattaaccagaaatctgaacccgttcaatctctaatcaacgctgtgaacaagtgtttaagagtaaaagttgattatttaattgagaagggaatttttacagagtcgtttaggctctgttgttacacacttgatcctaaatctgtctacacaattgtacactcaattctacacaagttacacctgtttacacctgaagatttcgcaaatttaccaaagtttttacttgattttaagattcgagacggggttattctgacgaacattcttcagcactctgttatctcaccaattaacacgtttaactccgatttgtttgagaaatttgttaaaaatatctcaatatttgaccaatttcatgataccaaggagattagtttcaggccatccgtaacttatctacaaatgctaagggataaacttgattcttatgataggagggaattattttttatcttatccagcgttcctgggattaattttgataaacttgcgagaaaacggtgtaaggaattggttagtcaaattcttgaaagaattggagtatacaaaggtaataaatttaacactatagcacacttggataatgaggaacttgttagcctaattaagtacctaaataaagccaattttgcacatcaatcaggtgataactttatcaagtcactactcaatccacaaagtgatgcagaattgacactagcagactccacacagagtgaacagagtgaacagaatgaacatgaacagttgattggaaatgaatttggtaaggaattgtctgagcggttcgttaaggagatttcacaagcttcaaaatcccccgacttttgtgagacctttaaaaattttaaagccgtagagtctttattatttctgttggacaggttaatgatttcaggcgttgataagttttatacagacagtttactagtgtcatttaagagcattttgtcaatgttgtccagttgtgtggagtcaaatattttaccctttttcactaatatttccaggttaaacatggaattactaactgaaatatcgagggaaatgtataaaattggtaatcctagggacctgagagtgtttgaaaagggtttaagatttaagctgttacaccttaaaaggaacccagaccccttggaatattccaatactatcactgagctaggcgaattttacgccttaaaaggtgaagttagtagcgaaaactttaagctaattctcaaagttttggacttaattcaaagattctcaagtttagcacaagagtttaaagagtttaaagagtttaaagattttaaggaagagtttaaagagtctaagaaagagtttaaaaaagagattagggaagagtttggtcagtacggggctgatttcgaagcttcttttgataaattcttgagtttggcgcgtgagtttgtggaaaaagatcccacgttaattaactttacaacttggaaactactgtctaaaatcgctggaaactcaaaatttaagcctaaaatcgatcaactaactcgtctcagtgttacagaactgaagctgccacagctgtttggactcttcatgtacaatcttaaaactgcaaaattgagttgtgaagattcgaatttgaacataaattctccagatttaaacccacttgaatcggtgaaggatcaaatttctgagaaattggaacgtctggttcaaattctacaggaaaagtttacgcaacgggtttgtgtaactgatggtgagattaggaaaattaacccttggatgagtgaaaaaggcgtaaaattactcttcaaaatgcctaccgaacccttagacatgttcctatacgaaaaatgcccagaaattaatcaaatattcaatcttaatacacaagggttagcagattcaacacacgtgtcatcacatgtttcatcactctatgacttaaaaatgtccttactagtcatgagtaaacagttgattcaggaggaactaacacttaatcagagtgaatatgataacataaggcaaatggtggtagaattgggaacaagggtaaggagagcgattttggaggttgagatgtgcaggccaatttcgaggaacatttttttaccaaaaactcacactaaacaattgataaaattaagtttaaatcgtttctggcgtaaaaatggaaattcggaaaaattctcaaaaaattcatctcatccttcctaacccaccaacaattttatccaacacaaatctttttacccaaaaataaatatttttacccaaaattaaatgttataaatgtaaaattaaatgttataaatgtaaaattttgttattttgtatgtaaagttaaatgttttatatgtaaaaatttgttgttttatacctaaaattttgttgttttatatgtaaaaacttgttgttttatatgtaaaattaaatgttttgtatgtaaaattaaatgtattaaatttctggtatattgccataaaaaatttatctgcgatggttcacattctcaccaaaaataaaagatcctggcatctttttatccacaaatcttccatcaaaaataattaattaaaatattcaataaaaatgtttacttgatggaaaaaatgataaattaattgaaaaattgacagatgggaattccttcgttttttcggtggttagcggagcgctatcctttaatttgtgaatcgcaggacatctcaactgccgataaagccgacgccttcacactcctaaacacctcaaaccactccaaacacaaacatctcaacccaaaatttgataattccaatgataaatttggtaattccaatgataaatttggtaattccaatgataaatttgctaattccgctgataaatttgctaattccgctgataaattcgacaatttggaggaaaaattcgacaattttggagtggatttggcaccggacggttttgacaatttgtatttggatgtgaatgggatagtgcacaactgttcgcacagtgtcgtggatttatgtcagaacataacgtgcgaggacgacatcttcgtgtcgatttttcagtgcataataaaaatcgtcaacatcgtccggccacggaagctcttatacctcgccgtcgacggcgttgcacccagagccaaaatcatacaacaaagagaacgacgcttcagagccgctctcgaatccacacaacaactcatcatctcccaatccctcaaatccactaatacacatcttgaaccaagtttacacaatttacagtgtgaaccagatgagagtgtacagtgtgaacccgatgagagtgtacgggataaggaagagttcaaatttgaccctatccagataacgccgggaacggcgtttatggagcgattgacggtgcggttacagttttttgcgttaaagatgattaacgagaatgagcagtggcggaacctgaagatcgtcgtcagcggctcagacgttcccggcgaaggagaacataaaatcatggaatacatccgaaacaacaaagcacacagacactcacaatttcatcaccctagaactcagttagacaatagaaataatacaactcagttagacagtgtgagtggtgagagaaattgtgtatcgcattgtgtgtatgggttggatgcggacttgatagtgttatcgttggcgacgcatgagccttacatatgtttgttgagggagcaggtggtcttcggtcacatgaaaaactcctctaaactccgtatgatggtaaatatgaacagttacatattattacacgtggggattctgagggagtatttagtcactgacctcgtagaagacccgagactacgctcggatccctcggttattgacagagttgtggacgatttcgtatttctgacaatgttcgtagggaatgatttcctaccacacctgctcatggcgtccataccagacggtggtttcaaccacactctacaaatttaccgcgaatatctctccgaatctctacgtaaacacaatttacacagtaaacacaatttacacaattcacacagtgagaagagagatgtatggttgacatcgggttgtggtgaggtgaattatgacaatttggtgttgtttatgacgcggtgggcgaggtacgagaacagaacattacaaaataacctaaccgcagaactagacaaaaccacttttaaccctcagaataatacttccaaggtggtaaattttaacagtaacagggtgtcaaattttaacagtaacagggtgtcaaatcactctgattcagcaaagtccaagtgttcgatcacggtgattgacgtgagaaacagtaggatagagacggatttatcggattttagtagtaagtacccgggtgagccgaggactctggcggagtacaggaaccgctactacctggctaagctgggcatctccaaccaactcgtcaagtgccaacgctctactaactctactaactctgtaaattccgtaatctctcttaacagtgtaatctctcttaacagtgtaaactctcttaacagtgtaaacactgtaaacacagtggaagatgtggtaagggaatatttacacgggattcagtggattctgtactattactaccggggagtgccctcctggaactggttcctaccctgcaaatacccaccattcgtcaacgacatcctcactttcctcaaaacacattccaacactttgactaattctaacactttaaccaattctgacacttttacacaattctccaacactttaaccaattctaacacttttacacacaattctacattaccaaactgtaacacttcctcaactaacactaatttaacaaattctaacactaaattgccaaattctacactatcaaaaggtgtaacaatgtctgaggtgttgagaattacgtttgtgaggggaaggccgataacgccgtatgagcagttaatgcttgtgttaccgccgcagtctgcgcatttcctgccaagtgtcttcagtaagttaatcacggaccaggactcacccctgcaccagtattatccgctacactttgacgtggacatggataacactaacgtgccctggggcggcatcacactcataccacacgttccatacccacttctactacaacacatgaatcacgctctagacccagaccatccaaacacaaccaatcacattggcaatgctattgatagtatggatgtggacaaatctgttggtgacaacacggttggattaaagagtttgaacaaaatgagtgaggagttgaattatttgtgtagtcggatgttaacggaggaggagaaggacaggaataagtttggtttggctaggatttactcctacgactccaaagtgtccaagcatttggagtcgccttttaaaatctttgctgatattaaggagtgcaaagtcctgtgtaatccttttttcaacccctcactcaagtcaaatccctcactcaagtcaaagccctcactcaagtcaaagccctcactcaagtcaaagccctcactcaagtcaaagccctcactcaagtcaaagcattttccaaattctttactattaaatcactccgttacgcaaattcggcacaatttcctattcccaagtttgaatatcttaccgcacagagccctgtcaaagcgcggcgtggacgtctttaacacaaagtccagacaccccagtgtctatcttaacattttccaaaatcttaatctcacaaacttcacaaagtgtatcacaaatgttacaaagtgtggcacaaacttgacaaagtgtggcacaaatgttacaaagtgtggcacaaatgttacaaagtgtggcacaaatgttacaaagtgtggcacctatgttgccgtgggatatccttataaacacttggggaagctaaagtcaatacacacgccatacctaacgtacagtgacgggaaattaaccaccagtaaaccctcagaactcaaggaaatcattggaaagatcgatgccaccttggacaaattgggactaatcgtcggatacaaaacgggcacagtaaactccaacccgagaattttagatcagaataaccaaatcctccaaaacttgctcaggagattacagaatagtttgagattacagaatagtttgagattacagggtgttacgtcacagggtgtggcatcacaagatgatgtgcgatcacccccgttgagtgtggtgaatgcggcaagagtcttgggtttggaccacttgtgtgagaatgtggtggtaacttacacggtgctggataagaatttacaggagactagggttaccagggaggcattacttccgatggttacgtttctggatcatacagcagcagtttccaaacacgtgacaccgtacgacgatgtaaacaaagtgctaaagaaggaaatgttacacttacagcaggaactgagaacacaagagttactatatggaaaatatgataaaccgaagattaaagtggtttgcatgatgcaggggtcaatgtacggccgggtaggagtcctggagtctgtagggaaaactttcgactctgtcactgcagtttttacactaccaaatgtaaagttaaccatcggggacacttcgttgttggattttaagaactttatcaatttgaaccagaagttgtctgcccagaccacgtggtactcttttgaaaatgcgtgccaaatgacgaatttggaaccacaagtcgcccgcctaatgttccagaaatgtctagtcggcgagtttaaatctgatgttagcatgtttaaaactgatgttggtatgaatttggtgtattttgatacggatttgcaggtgcctttttgccttccagggtacacacaactgcttcaagggtacacacaacttcttccagggtacacacaactccctccagggcacacacaacttcttccagggtacacacaactccctccagggtacacacaactccctccagggcacacacagttgagtacaggatacgatactgaactagatcccacggaaatggtacaatactctgccgaatgtatacagttgattcaactgtataaggaaaagtttcctgagttatttgactttttggaaaacactgagctgacggagaagaaatccttagacctcgcagagttgtatcccaatttaacccctaaccaatcctcatatatgctaaagcagattatgaaattttgtgactcgcagccgtttagacgtctgaaactcacgcaaggcaattacaaatgcatgacgaggagtcaaattcaattactaattgaacatcaaaatgagtatacaaaaaatttggaacccccaaacgcggttaaattggtacgagtcagtcatttgaagaatttgcacgttccagcctacaccaccacactcgtcaatttcgacccctcactcatatttttgggccagtccgtagtttacattaaccataacgaacaagtgcccctcggaaccaaaggcacaatcgtcggcatataccccaatcaaactccacaagatacacaaattacacaacacacacaagatttacaagattcacagattatacaagatacacgagatacacaagatacgcatggtgaattggataattttgatgagttgttgttggagttggtgttggatcatgagatattatctgcgactgatttgtttggcaggtgcgctaaaatgcgaggcatatttgtaagacccacagacgtgctctgcctctacaataacacacaaaatgtaaacgaatactcctcactcctctcacaactcgatcgcaacaactcacagttcatatcatacgcttaaactcttacaatttatcatacattttacacactttttatactattttacacacttttacacatttacacacatttacacattacacattactattgtatacattttacacactttttatactattttacacacttttacacacttttacacacttttacacatttttacacatttttacacatttacacatttacacatttacacatttacacatttacacattacacattacacatttacacattacacactactattgtatattactattgtaatattgtgtgttatttacaaatgatgtattgtacgattcggttacagtattcggggcaagtgtgggagcactctggttcatgtgttttacactggataaacctcggaaatttaaacttgctctcgtccttaatccactcaaatccaattcctaaacataattaatcaattgtatgactatacattgtaatatgactatacactatgttatactatgagtatatacttggtatagtagtgtatatacttaagagtataataagtatatattgtatagtatagtatatagtatattgtatattgtaccaaatgcgatttcctgattctctttacaggtgatggaggaggtttcggttcttttaacgattttactcttggagtttaaatcctaagcaattaagttttaatatatttaacccagtatttctttatacacacaagccacgtatacaacggatcaccctcagtctcacacctcgtctcacctaatcatattcacagtataattatctttaacacaatcaaactatctttaacatagtcaagttagttataatagtatgagtactggagcgaaccgagtttgcagggtttcatgagtaggtatttggacttgttttcgaagaagtatgtgccgaggaagatgtgaaacccgttatcgcacgcgggttcctgaaccagataattaacataaatttactttactgaaccagataattaacataaatttactttactgaaccaaataattaacctaaatttaccttggttatagtttgtcttaggtttactatgttctgggctctgcaggcgatccacagtgtggaatggccgacattttcatgagcaggagctgaacactcggtagcgtggattggacactctttaacctcatggttcccatcctttagagataatatcatgaatccaaattgtacaagctttccatccttgcaactggccttgacatcaccagtgccctgggcatgctcaatttcaacctcagaaatctatacataagtaaatacataccagaaatctacaatttatatacataccagaaacctacaatttatataaataaaagacgtaccaggtcctcgggggttagttctacttgagattgatacctcaaaaagtcactctcgaggataactttaccatagtataaataagctttattataggcgtcacgaaggtttttatctataaaatgagaaatcggcgtaaattcagcctttatgggcattgcgtgatctgctacggatctcgcccattcggcaaactctatcgttttaccatggccgtaaatatccccgccaagcacaaacgttgactttttagtgtccagcaaaaagtctccggcgtttttagactttatagttgaaacctcaacattggaatcaatatcagtgtccttaatcttggctgacagtatagccctcacgtctaatccctggtcacttaacttcttctcctgactcttctttatctccaacgttgtaaatatcttacctcctgaatattattaactgagattactgtatttatgttattaactgagattacactatgaatattattaactgagactacagtatgaatattattaactgagattacagtatgaatattattaactgagattacactatgaatattattaactgagactatattacccaggtaaattttagttgctacgtgggtcccgaaagtgttaaaaagctccatccagtctgagatgccaagttcctgacagttttcattcttaggatcttctctatagataaaaggtttacagattgagtccttttcaagtcccttgaaatcacttaatctcccgagggaagattggaatccaagtgtaaagtccctgaggaaattgtgtaagtgggaattaccattttagcgaggttgagatcccggcaacgtatttgaagcagtatgatttgttaatgaacattttacttttcccagatttagaaacgtcttggagttttttaaacttggctgaggctgaaaatttgaacacgtcaccgggtaaacttaaagaaacactcgcatctgctgaaagtgacttcagtaaagatttacaagagttaatctcagttacctaatcagaattatgaagtttggacttacagattcaaccttgtgacaggaagagtagggcctgatccagccaccgacgggctgtaaaaacctcaagctgttggagatattttcaatatttctactccagtgcatttgaatcacactggatttgtaacctggatccaacaaagtcacactgtctcccaaaggatttccccttatcaagtcataaccagcaccaagatattctagaacaagtattaacacattaaattatattaactattgcattaacgcgaatcatgaatacacttcctacctaatcctgacggtgtcttaaacctcttcacataatccacatcctccagttcctctgactcttcttctgtgtcttctacttcatcttgtgtgtcatctgtgtcttctagatcatctgattcttcatcattattagtttcttcctcatgtaaatcatcagtttcattttcttcttcctccccttcgccagcttcatattctccctcagactctcccgtttcatcttcttcatcttcttcaacgtcattagagttattttctcctgtcaaatcttcacttttatcatcttcatcacctttgtcattattgtcatcgtcttcaccgaggatgtcgcccaaatctgcgtcatctgcatcttcttcatcatctggtaacttgttgtttatcaagttgttggctaattttgtggcaattggtaggccatgttgagcaattttacttgctgagcttagggcaaagttcttaatcttagggcttaacttttttttactaacccttgactctgactcaaaatcttcactatacaaattgtgactctttatcgcagccagcctttcttttctaccccttttaccccttttaccagtgggtaaatcgtttgataaatcatcggacaaatcgttggaaaagttgtttgaggggttgttggagtgttttttacactttggtcccttcttacacacgcttaaatctctcgagtttgtcctcttagaattgtcattatcctcttcaacagttgttttcttcgtttccttcaccttttccttctgattatttggcttattagttgattttttgatgtgtttgggcttcttagttttggtgctgtttgactttccagcggctttttctgcaaacgaagtcacatttccagtgccaaaatcgtcattttcatacccttccgggggtaaattgtgattactaatttgtgtatgggatattttaccagctcccgtttcttccgcttgacccaggtcaaggtacagagccttacaaacccagaattgaatcagacaaaattctacaatcatgccagccttcttcatctttttgcaatgctttcaacattaattttttttaatttattttttaaattttttaaattattttttaattattttaaatgtagttttaagtgtataattaatcgcagtaattagcaatttttaaacttttaaagcctctaaaaatgaaattttactatgtaacaaatatgttttacggtgtaataaatatgttttacggtgtaacaaatgtgttttacggtgtaacaaatatgttttctgggatatgttaagtttgtggttaactttgagtcttcttgcgttaaaattacacagattagaatcacagctgttcattccctgcgcacttttgcttatttgtcaaatcatgtctggaatctcagccttcagaattcttaaacacaattcacaccccctcaatcctctctcctcttttaacacattatccaatggattaaccaacacattatccaatggattaaccaacacattcagcaattgtgtggatacaaagttatatcagactgaggtaaaatttgcggatttgaaccctaaaatccctaggcattttgaggataaaatagccagaaggttggatactgacatgtcaaatccggtgggaattgtatcatatctcatcagggacttttttaactctcatgacattttaaagagaaatttcgagtattttccagtcccttttgcgccggtgacggtgagtgagaacttcgacgagcttcaggtcccgctcgaccacgtctccagagaccccaaagactcttactacctcagccaacactacgttaacacatttacaaagttgggtaaattgtataaggaggtgattgacactgggagaaacggagattacgacagggatttaatacgcctgatgggtaaaaagtttgggcactcggagcacaaactactgccaacacacacaacatcacacattacaaagttactccgggccggagtaactcaagccatttactcaggtaacacattactacaatatttgtataataattctatagtatttgtataatgattgaataggtcaggtgtttcggagggatgagattgactcacagcattacccggtgtttcatcagatggacgggtatctcctgtttaccagacaagatattgaaaatttgaggcgatttgacgagtttaaatgtgatagcgttactgaagttatcttcagacacctgaagaaaactctagagaatctcataacacacctgttccaatttgttaccaatactaatggttctaacttgaatgattttggggaaatggtaaagtttggagacatgattaaatattgggatgacggtgctacgttcccgtttacgtttccgtcctctgagtattatctcaagaacggtgagcaacccactgaactcctaggctgcggcgttctcaaaaatattatcatacacaataattttaatcttaaatcggtaggagaaaaggatttcagtgataaatcggtaggtgagggattagtggttgacaaatcggttggagaaggattagtgtgtgacaaatcggtaggagaagaattagtggatgacaaatcggttggtgagggattagtgggtggttgggcgtttggaattggattggagcgtttggcgatggtcctgtgtcggatccctgacattcgtcagttttgggaaactgacgaacgatttctaaaacaatataaacacagttttacccataagattctaccggtttttgtaaagtatagtaagaacccgccagtggttcgggatttatccttttacatcgcagacacttttaatgagcaagtgttcagggaaatcatactggaaaagggtaaaggatacgttgaggacatacaatttgtgtccaaatactttaacgagaagattagtaaggaaagtttatgctacagagttgtctatagagcatttgaagagaatttaacaaactcgttcgtcaacgcaatacaccaagaaaccctcaaatcactagaaaacaaactcaatctaatcatacgctaatattactattacacattatattagtattatatatatagctataggtatagctatgggtattatgtgtctgggtttagggtagtaaattaggtgtatattaagtagttaataatactgcttaaatgggttcaatatactataaataacagtttaaggaatagtaagtgtttaatagtactggaataagtgtaatcttactgtatagtaaagtgtataatataccctagtatactcctactactatacatatactattatatatagtatatatagtataataggtatggtaagagttaagtgttataggtagtaaattagggtataaatactatagtacattactgtttacagtgttttacaacggtatacaagagtgttgaggagttgaaagtgtttgttaaggtgttaatttattactatgctataatatactcctatcactatacatatacaatatatactatagtatattatacatagtatattatatatagtatggatatatggttaggagaatagtagagttaacagtggtatagtatattagaaattaaatcctccagggaatgtggcatccgatgaagacccatgtggagaagagattgcctagaagaggataaactttgcagtgtatgacgtagactagatcatccaatttgttaacaaataacttcttgaaccttttattgcagcatagtagtctcctgatctcgttaacgtcactggtggagaagtggattgggattccaataaaggtatgatttgccaggactggcaccagcttcatccagtcataaatacaagcctcgtaaaagtaatacatgttccactgagctatctcactacacttgtgaacactaaactcgtaaggtatgttgtagtcggtgtttacataatttgtagactctgggacttgaagaaatctgcccatgtcatcaatgaactcagggtttctgtcatatctcgacagctttgaaggcctcaagtgcttaaacaaggattttcgcctcagattcttgttccttataacataattcctctcgttcatataattcgttaacctcacactcttaggattcatcttactagggttaatttttagcttattagggttaatttttagcttattagggttaatttttagcttattagggttaatttttagcttattagggttaatttttagcttattagggttaatttttagcttattagggttaatttttaggttgttaggattaaaatttctggctttttcctggatggcaactctcattctgtgaactgcagagtgaatgatgtcagattgagtgttaaatttgtatttttcaaggctggatattgacaaatcagacattggagtcatggaaatcccggcacttgagggcgtatttatgggatcaaaccgggaataaatcttaaattcaggaacatcagctcgcaaaacgtcatcgaaacttttgtacaaacttggcgtgttctggtgatttggaggtttcgattttttaacattttgaggcctaattaacctctttgaactgatttggaatccgtttttacacacttttactctttttacggaatttattattttacccagagttgtcctgggtctaccctgtccaactaagctactgcgtccaactgagctaccctgtccaactaagctgctgtgtccaactaagctgctgtgtccaactaagctgctgtgtccaactaagctgctgtgtctgattaagctacggtgtttggggtcatgcagggtctttttttctataggttttgaccttctttcacctcttcgatgtcttctttttctaactctagttgatttatgcttttcaggctctttttctacgagagtattaccttcgacatcttgctgctgttcaaccatttccggagattccaaatccccggctgatttctcagatttctcagatttctcagatttctcagaagctttttccatctgctcattttcattaatttgttcatcaacctcttgatttacttgttcatttgtgggttgattaacttgttcatttgtgtgtagtgttttgggtgaaacgtcggtggattcagtggagtcgtaggtatcgaatttggttttttctaaatcatttgttacttcctggacatttctcatcttgattgtcttttttaactctttcctgttactccagccgagataattattcggcattccggggtcaaattgaggatcaagtcgctgcctatactccattatatccagaaaatctatcaacttccccttcatatcttctcttttcgatatcgaacacttcaaacccctacgcgctcgcatcacctcaatcatgtcacaaacgtcattcgctacatcattcgacgcctcaacactacacaccatcattattattatataatagtgtaagagtataattatataatagtgtaagagtataattatataatagtgtaagagtataattatataatagtgtaagagtataattatataatagtgtaagagtataattatataatagtgtaagagtatgatgggattaccatttgtggagagttggtggtggtgtgatttgtaggtattgggttaattcatcttctaggggtgctttgaggaacggtttccactgctgttcatcttccaaatcgtataaaatacatgacgggtgatggttctgcctattcccccaaacctgcctgttgttaaacaccgtctcaatcgacgaatacggcaagtgaaccaacgtctcagacggcaccatcaactcctaaaaacactgttaaccatagattaaacagggttaaacatgattaaatgggaatgtcagggattaaatgggattaaatgagtgaactaagtgggaatgaactaagtgggaatgagcaacctgtttgggtttaagttgtttgagtgttttggcgaatttttgtttggtttcgggattgtcaagtatagttttggttagttgatctcttagcgcggtgtcaaagttaactttgtcatgtttgtggagtagcgcgtctaaatcaactctctggtcaggtacgtagtcgtttccgtacatttcatactttgtgagcccgtgagttttatttgtctcttgaagctgctgcaaattaaccggttcaaagggaatgttttgatagttatccaaaggaactaagtttggatttaaatcttcaaagccgtcggagtcttccttgggcactcgccagcgcttgggaaggtgccagattttcttatttccagtttcccaaaatgagactgtggaatctgagtgcctggtcatgacccagcagtgttcaacagttccgtttttaattgtgcccttgcagacgtacgcgtcaaaattaatccccagcagacaactgcagagtaaaatggccctgtcatgaaggccgccctttctcgtagttaggaatctggaaggagtttgccagttatcaattttccttagctctcccacagtgtctactgagtcatctttaagcgcaaaatttgaaatccagtgcaagagcattccaggccttgataactgagacggcacttgtatcggcgtgacaaaacatgaaagcggaacttccgagcctgagatttccattttaagtgcgtttgtcgtggttaaaaaccgtctatagggaaatgttgataaagtctgatctttatacattttctgccaggtttcaaattcccgatcccagcgtctggctaagtctctgcaagtgtcggatttaacttgtctcttttgatcatttgggaatgttaggcccctgggcattggcgggagaatgtacatttcaaaggtaattgtaggtttagagcctctgtgcggcactgtaaaccctgttaacgtgagagtatctctatacacaagagtctcatgttccacgttaacatcgttggaaaatccagagtataacactggctcaccagcctcatgagtttcctcgtcacctaagccgtgtttcgagccttcattgtaaatcccatccactagggtttttttagtctctgtcccgtttaggaataggcgcgatagtggaatttccacaccgcctagaaattcagtagaagtgtcatcgccgtcccagacctccatgaccacaggacccttggataacaaatccaccggtaagaagtttaagataaggtgcgggtttctcgtctcagcttcgtctactaaatggattgggaagtacatattatgattatacactgggccggtagtggactccagggtgggtgtacaattgacaatcccgtcccatctgaccttaaccatgggatctgaggaattagtgtcagtattagtcgagggcaaagattcacatctgacaatccttatgactaagtatctgtaacttttgtctaaatgtgtcaggagtgaggatcctgagatgggctgcgcgggtctattttgattcacgtcgtactcgttcatgtccacactgctcatgtaacattccacatttccctggattatcccactttgcatttgatcagcgccttgggctagttttttaactgctcctcttaccaggggataatccctcactgacctgagtgagataacacaagtcccaagcagtgtcgtggttctcctccaaaacttcctgctgatacaataaactttaacttgaaagtatgaaattttcatgtgtcggatggtgcctctgtacttaaaatcaccggccgaaggccagtagtcgtcgttggaaatgttagcccacttactgtcccagccctttccaatctctctgataactgagacttttatatttttaggcgcgttttttaaatgcgctgggagatgcgctgatggagtgaaggaccagttcataaacctaaacgtgaaatcaaagatttcctccaagagcattactacatttagtttatggagtggtatttttctctcagtatcctctgtgacaacggagttaccctcggtttcattcacatttttagggactgggatttccaacgacagcgtaagatttgacttgctttctataacatcttgaaatgttaagaatctggtagcgtggagtgtgtttaagctgagtctgtgtttcttccataaatcaattttaacgaaacaatccttcaagtcagcgtaggaaatctccatcttcaccttgttacatatgaaaactgaaaattatgaactaaattatcttacttgggctggacaatgtcatactttctccaggtcccagggtatacagcggagtataaatttttttactatacctcgactgggcgttgggattaattcggccaatttcaatgtagtaaaagaaattctgagccacagactctaaattatgcgcagaggtgatgtaaaagacgccgttccagtgtctaggagcacggtcgaaatcgtaaaacttgccactctgctgactgtactgcctgaaatactgaagtaaattaaactgttcccgttgctcattgtcagaatcttcagaaactgactcctcactttcaaactcagactcctcctcagtattctcatttgaatcgatttccctaactgtttcctgcaaaatattgttaattcagttggatacctcggaatctgagcctcttagtcttgtgtaatcggtctcaaacaggtccactgctctctcctcatctgtttcatctgttactcgttctacgtaggaactttcagactcttcgtagtataaattttcagaagagctctccctaagttcccaaacctcaacctttcccatgctctagacattcatattttacacatactctagaagtttatattttacacatgctctagaagttcatattttacacatactctagacgttcatattttacacatactctagacgtttatattttacacatactctagaagtttacacattttaaattcatattttacacattttaacaattcatactttacacattttgacaatttatattttacacattttaaattcatattttacacattttgaagttcatattttacacattttggaaatttatacttaatattatttcacataattaatattaaattatgaaaatttaaggaaaactggggaatataatggaaaaatcgggaatagtggaaaattcggcgaaaatagtaaaaaattaggggaatagtggaaaattcgggaatttaatggaaaactctgacatttctggttgagccgtacaacacttggcaaaataaaaaataaactacaaaaactctaaaattaacattagtcacaggtgaaaaattaatttaacataaatttacggcaaaaattcacattctggcggaatttaaaaaaattcattgtggcggaatttaaaaaaattcattctgacgtggagaggctccgtaatccaaaaattaaaatttacctaaaataactcatttatgtgctgagccgacggcttctttaatatttttataacctaaagaaatattaattttataaatttaccacgttggtttagtaatttggccaagtcgttctttattaggctggggagcttaggcccgtggtacacctgaggcaataattaatctattagcgtaccagtcctgtaagaagttggcaagctgaggcgccagcctcgatcatttccagggcgtcttgcgccgtagagattcccccgcactaaacaaattattccatccgtttcttacggcgatgattggtatttttccgcttgtcagtttatacatttggaatacaacttttctggcgtgttccttcagcggatgaccgctcaggcctcccctgggatttccagccctctccaactcctctcccaaacactcaggcctcgaaatctggtcaaaatttaggaattagttgaaattacagttgtgtttgtcagcacaagtccatccaaaccatgctccaacgcctgcaaaattcatattttaagcttcttacgatatcggcaatgtcctttagctcttgatccgtgacatcaggctatggttcattttattaattttacttactgaaattttaaaaaataacaacggcctcgttttcgtagtgtttacgtatgttaaattctctgtagaaactcttgtctccaggtcttttagggcgtttttggccgtttttacgagctttagcaggggttcttttctctgattatctctcagattcggcgtgttcggtgagctaacgttgatgcacaggtaatctgagtacagtccgatccgctcaatacaatgtgacacatcagccaaaatctctccattgagatttttccctaaaacaactaatttttagttagttacctatgctaattccgataattgagtcccttgtaagcggatcactctcctgcctagccctagccaccttcatattctccaccgcaacatcaattcccaaactgattcaccattaatattgagttagtataatttacctgttgaagcctagtgagttgatgagtgctttattgtttgggagtctgaatagccttggtttgggattcccgggctgtgggtttggtaaaacagttccaacttctatgaacccaaaccctagccttagaatctccagcgggacctggcagttcttatcatagccagctgccatacctaatctcagtgttaaatatcattttaatctcatttaatctcagtgttaaatatcattttaatctcatttaatctcagtgttaaatatcattttaatcagtgttaaatatcatttaatctcagtgttaaatatcattttaatcagtgttaaatatcattttaatctgtgttaaatatcatttaatctctgttaaatatcatttaatctccgttaaatatcatttaatctccgttaaatatcagtgttaaatatcattttttacctattggattaaatattttaatgtgcttaatgttattatagagaatgggcggatcaatggaataatccacgggtgtaagtcccaatttggccagaactatgctaagtttatgagattcctcggggtctagacatttccttaagccgtacagaattccgtcgtaaatcggacaacttggattcctcatgcaaacgtatacgccaacgcccatgccaaacacaaacacgccccgaaccagaaacttctaaaaaattattaaaatatttaagctacgttgattttgcgattttggttaatctcagagtggattttaccgtttaccgcggttccgcagaaccgcctgaaatgccgtaaataaaacatgtatacacatttataatattacaagtaaccacacgcctccaaactctccaaaaacgtaccactcgatatgtaactcgttcctaaccaaaattttaaattattaaattattggagtgtaatagtgtaattgttggtattggagtaaatagtgtaagggttggagtgtaaggttaccaagttcgatggtcttttgaattgcgatttccagcgccaggagcaggtgcttaatcccaatctccggcaccttccccgaatttgccacctaaaaacattaacccagagcgtacagaggtgccagatttcgtattttagctgtcaaaattgctattttaactgtcaaaattcatattttagctgtcaaaattcatattttaactgtctaaatttcgtattttagctgtcaaaactctgtaataactatagcaatgggaagcagtacgagataaatttcttcttgtgtgaatgtgaggtcttgaagtttgactccgctgagtgcctggatgatctcgtttgggcctgtgacaagtggcacctgcgtggacactgtaaacgcctccgtcacgttcgccatctaacaattgttaatagtgtaaagattacttccatgaactcttcttctgaggtggtgccgataacgaaaatgcgtctctggtgttccggcgcctttttaattagaattaaaaggcactggagtatgttattgctgaacctagggccaatcggcgagtaatctatcaaccgctcaatgttatccaaaattatcaacgactgcggtgtcttatgcgcatcatcaaacgccttatgtatcgcattcaccttcgccaactcctacaagtttataccgttacggggagagtgcgggtgtctcatttactaactcacatactaactcagttactaactcacatactaactcacatactaactcagttactaactcagttactaactcagtgactaactcagtgactaactcagtgactagctcacactgtaaacaaataactaaactacaataagaaagatactgagagtccgatgtaagattctggtgagatgactttgacgaatgggaaagctgcgattgatgctacgtgtgctgctagtgctgatttcccggaccctacgggtccgtgtaagagcactgagagcacgggtgtcttgtcggattttgacacttgttttgccagggttatgcaagtttccaaaacctcctggaatttactcccaaacgggataattccatgccttgagaatgtgtttaagtttacggagtccacgccgtacgcaggcttaacctccaacaacgctgactcaaagtcgttctggttcactattatctggtcaatgttcttcggcctactcaagtcactaccatcaacatgacgctgtatcgcataactcaccgcacacttcaccaaaccctaaatcattcaatttaccattgaaattagttacaactgttaactatactgttaactatgtaatattaactatgtaatattaactatgtaatattaactatgtaatattaactatgtaatattaactatgtaatattaactatgtaatattaactatgtaatattaactatgtaatattaactatgtaatattaactatgtaatattaactatataatattaactatataatattaactatgtaatattaactatataatattaactatataatattaactatataatattaactatataatattaactactgaaatgagttataaaatggtaaggttgggtcaacaaacttcgagttcagctccggagtaatttttggtttgtttgacgacgtggttgagatcgacgtcgtttgagagtcgtttggattccctcattactttggtgtgtattttaagtatctgttgcctgccgttttcgtctggtagtcccacttctatgtgcacctcaaaccgcccaggcctcaacaacgcctcgtctatcatgtccagccgattcgtcatgccaatcaactgaacaaattacatcagtttagaattaccagaatattgtttaacgagtcgactccgtcaatcttcgacagtagctggttcactatactgtccctcgcggcctaatgcatgatagggttgtgtaatcatactgtgccggaagtgtcggatcctctcctttggcatatggagtcgatttcatcgaatatgataatgtgcaggccggaccggtcacccattcgcgcatattcgttctccgcgtccaaaaataaattccgcacattctcctcagactgaccaaaaaaacgactcattatctccggaccattcaccgtctaatattcatcaagattgattattcaacaagatttattattaacaagatttatgttattcaatattattaatgattattcaatatttatattgatgattgattgtgtatattgggaagtgagtgaaaattaccttgagtttggtgcagttgagagctttggagatttgtctggcgattagtgttttaccggttccgggtggtccgtagagtaggaggcctgtggaatcaatgagctaagtgattaacctttgacgtgtgagattccgagttccttgaggagttctggcgggtaaattctggatgcgaatgctctcctgaaaatgtccgcgaattcgttgtctaagcctccaattcccagctcctcaaatttgaaattgggtttaaatatgctctgggtctttgggatcttaagctctgtgccctcgattgtcgtgtagccaaattccaactcagtgtccgaacacagcctcgccttaattgccaagttaaacgaatgctcgtcaccagagtccaagtacaagttacacaccctaaacaaagttattgagttttggttacttgagccgaagctgtgacctgtccagcagcagcggcaacgattggtcatagtgcaaaacgtgctcattaaacatcttcttcacctgtgacgacaacttctcaaactccaacaacggtatctctaaaccacacattcacaaactgcaatattgtgtactaatgtgtaaatagtgtactaatgtgtaaatagtgtactaatgtgtgaatgtgtaaaatgtgtaataatgtgtaaaaaagtgtaaatagtgtgagaatgtgtaaaaaggtgtgagaagatgtgataaaacctttattttgtggtttgaagtgtgagacattgaatttgatgcgatgtgcgggtgggtatttggcggagatatcgaaatttctcgagtttccggtgtgattggactcggaagacactgttacgccctggcctactgagactttgataagttccctcgcgcagctgttcatgaaaatatccttctcagttgccagttcgtggaatctaatgttaactcagtaaattcattttaactcagtaaattcacgttaatttggtaaaataattaaaaaaaattacttggcgcaaaaaaccatcccttctatcgtagcataggccattatggactctgatctcagattttcatagagctccctgttgacgtatacctaacaatggttaaaataattgaaaatacgcaatttgtatacgtaagagactcgtctggtaattttttaactgttctaaacaccggtttcatcgcaataataattaaaaagatatgtactaaaaattaaaagattattgcgctagggtgtgtggtactgattcaggccttcctgttttgtacgaatgctgtgaaggcagggatcaacgagtccatggatttaacgtggagtagctttttaatggccaatgccgctttataagcttccatatactcaaagtcagacacatgctctggcttcgggcacttttgcggcgatgttaactccggcgaatccgcgccagactcaacaccgccctgcgacttactcaactggtctgatatgcttttcaaacatgattcgaaactctttacacacgcctccaactgatccaccctcgcagaaatacacaaatcctcaaacttaccacactgccacctaatacaaattattcaatcttattcatttaattcatttattcatttaattcatataattatttattgtttaattgtttaattgtttaattgtttaattgtttaattgtttaattgtttaattgtttaattgtttaattgtttaattagtttaattagtttaattagtttaattagtttaattagtttaattagtttaattagtttaattagtttaattagtttaattagtttaattagtttaattatgtgaattaattgtgtagtgagatttacttgggatttgaggtgtctggatgacgattgtgtgtgaaatcttgttgattagtttctgagtctgtggattgatttttgaggtacggcgagtttagtctgtacgcggggtcagaaaagcttgaccgggctgtgttatctgtatccgcttgatacaaattattcgactcacacacgtcacgtctcattttccccaaacttttgtaattgaaatcatttccccgaaacgcatttgacacgtccttttcttcaaattgcgacaaacttctcattttaagcatattcatcttagttaatgaattgggattcatattacttagtgaggatttgggattcttcttagttactggggaattcagattcatcttggttaatgaattcggattactcttggttactggggaattcgaatcccgtttgcattgtagataattattattttcagggtcgaagcttgtgacttgtgtgtcgggattctcttgttcttctaaatcactttcagataacattgagcccgcagggttatttgacatgtcaagatccttataatttgctctaaagtaatcagcgccagagttaaaacccgcaaaacagtttccaaccacatactttccctccaaattatcatcccgatcattcacattgttatccagatcattatccaattcgttcatattattgagattattgagagtatccaaattgttgatatggattgaatcaaaattttgggaggagcgttcggatttatcgtcttggttggttagttgttctgagaaattatctttatgcaaatctcttgtagcgtatgagtggtggtactgtggattgtctggatagaataagtcgtcagtttccctgtttgaaaacaaatcatcgccgttaaaatattcaaactcgtcccccttgttaaaccgaaactcatacgacacacactctaactcctcaacatcactcacacatccatcaacatatgtgtcattgtatgtattgtgcgtgttattatgtgaatcttgtaaatcttgtgaatcttgtaaatcttgtgaatcttgtaaatcttgtgtgtgttgtaaatcattgtgtgaattgtgtgagttggagtaatcttcggttttaaagttaaatttgttgtgattctctgggtttgagaaatcgttgctaaatattaggctgtgggtgtttaaattaatttctttcaaatcggttgtgtatcggttagtatccgaattcgtttggtttagtctttgaaaatcacgagagtaaagttggttttgctcctggtacgttagcgtggtgtcgtttttatcaaatgtgtactctcgggtcacggaatctgtcaggcatgtctcctcgccccttttttccgataaacacctgtcaaacgcttccatcacagccttctcaactaccgactttattaactcagaatctatacactcaatatccctcactgttcctcccactctttctcccactttttccagtgtgtaatctctcactgtgtgacctgatgtgtgttctctcactgtgtaatcacttgatttaggtaccggatctctgggtttgtgttcttttttctcatcggattgttctttttctctttcatgggtttccagcgggtaaccatacttgtccaggtaatacttgtggtcattatgcagtgaatacttttggtcattgtgaattaagtacttttggtcattatgaattgagtatttttgatcattgtggagtgaatacttttggtcattatggagtgaatacttttgatcattatgaattgagtatttttgatcattatggagtgaatatttggttccctgatcacttgagctgtagttggcatttgtgctatagtttgtcgtggacaagttatggtcaaccctgtgatagttatcagaatacattgaaagatgcggccgttccacaagattctcaccgtaaactgcgtgattctcaccgtaaattccgtaatttacggggtgaatcccgtcatttaccggatggattccgtgatttcccgggtagtgtacccgttccaaaagatttccagggtgaattccttcatttcccgggtgaattccatgatttccggggtgaattccgtaattttcatgtctgtaggtgtagtttgttctgtaatgattttcaggcctgaagtaaccatcctggtacctgctcaaataactcgatgagcacttgttaatataacccggaaatttgtccatataccccggaaacttttccatacaagaatatttgtccatacaagaatatttgtctgggtatgagggaaacttatcgaaatgtggataatgttcttggaatcggttaaaggtgttataatttgtgtaccctagtcgtccgtagttgaagttgataaaattgggattaagagaagccaagtgtgagtggatgtagtccatgttgtgaaaaagcgattcttgaggtttgaggttttggtagtactggacttcggagcccagattagtagcgtacctcaggatgaactctcgagcaaaattattacttgtgtttgttcctttggctggttttaaatttagtgttttaaggtccgatgatttctgggacgatttaatgctcctctgtacggagcgttctgcgtagtatggtgaggaaccatcggggtcagtttcgctttcgacgcttcttgcatccgtatagtcagaattttcactagcacaggaaccttctacgtgatttgcttggtatttggagcctgctaggtaccgaagagtggccactgggacagaccttcgatctctcggtgtctctagctctcctatttccaaaggacctgattccctattgtacacatctaaacacattaattattacccaagtaatgcggattctgattatatattgtaatttatatttgtggttacaaatctgactaaacaggatctgtgtaagattagatctaggaataagatttatttacagtagtaactatttgttttctgtctaaaaattgataaattatacctgagctatattttgttgacttgtaatgcttccgtctaggtgttttcatgatgagaatctcattgattatatcctgttaattacagaatatacattacacagaggaggcaaaaatgcgtcatagcagaaagaaatgtaaatttaaaagtgtggttctattcctccgtgttacacactattagaacaacatccgctctccccatctgattttgtctcataaattgtttattccaacttaaattcactttttattcaccttttctacacttttattttattacccctccctcttcctcatttggctctattctcattttctacccctcaactacttaacactttagttattctctcaccttaataccatcactttctcacacatttcaaccaattattgatttacacagtgccattatcactattctaattataattgtagtatttaactacgaataatgccaaattattaccaattacggataattataaaatatttaaggtgtaaaataagtataaattagtgtttaaaatcatcaaaatcacaactttacaaatcataattttaaaaattccaacggttaaaccataattttaaaaattccaattgttaaaataattgttaaaaccacaattgagtacaattgttagagcaattgttgtgagtggaatttagtttaggttaacttctttagtgtacatgatattatttgagtttgtgtatcctagttgtctggctctttcaatggcttcatcgcggtccttttcgaatattgcctggaactcctcggtgcatcctgcaaactccttcagtgagagtagaaaatctctaacgtgtgtttggaaccttatgtccttgtccttgtctttttccttttcctcctttacgtttgtgtttagtactccgctgattgtgggattttcatacacgttgacgtagttgtagtcgctttcgaagaactgcgttgcgcccatgcctgagggcgcagtcgtatccactgagtaattgaacaaatcaaccacaaacgcctcaatttgtttattatttaacgactggaaactcctggtcagcaggtccaccagaaacctcataaccccgagcttcgttaactccttactcgggtcatccaccagaccgttagccacgatttttactaaaatctttaaaatctgagtctgcagcctgaaacctgacttatgcaacgtgtccgtcaacacacccaacacctccgtcaacaataaataataaaacgtcaaacaaaattgatgcaacaccaccgaacctaataattcattagcacatattcgtatccactattatttaaacaggtgtatatccaacatctacaatattactcccctaatactacaatatctaaatgcctacaatatctaaatgcctataatacctaaatacctataatatctaaatgcctatatctaaatgcctatatctaaatgcctatatctaaatgcctatatctaaatgcctatatctaaatgcctatatctaaatgcctatatctaaatgcctatatctaaatacgtatatctaaaaactatgctaaaatctgttataaccttttgagatgatatttttcatgaattctagtgtgatgagtagtcctcggtctgcgattgacgggtgttcgtgtttgaatgcccatacgagtgacatgacgaaatctcttagtctttcatttgggagtaggagtacggagtcaaatgagcacttggttgccttgtggagcatttcgtaaaaatattccctgtggtctgggtatgcgtgaaagtccatcttcaccatgtccaaactcgtgtcgaacacgtagttaaaaatttgtaccaggactgaggaatagtttgaggccagccgttcaatgatctttgtgcttaatgagagtatctcgtagtcgcgtgtctcgaaaactgaatccctgtagtcgcccatcatcaccactaccaagttgtccaacagtgtcacaatcatctcattatcaaaccaattcccttgtccagcaaactcagcacttgattcagttgagtctgtctggttacacccgtccattgttagttcctgtgtcccatttggtccgaacttgaagaagttgaacttcttcccggcatcttttttctcagatttatcctcaataaagtaacagtagctgtcctccgcattgtatgtcactgcagaggttctattctggtcctgtgtgcgatacctgctcctattcacatttgaacttagtcccgtatactgcgtgtttgtctggtttaacttgttgggcacatttgatatgtaagtctcagataagtgaattatcgctcttctggctaagaatagcgtgttcaccgcgagatgttttatggtttgagttcctcctgtggaaacactgatttgtatgtacttgctgtagaggtgatacagcaccatcagtgtgctgaatatcttgttgaactgctttgtaaatgcaaatcccaccgctttgcagactctgttatttattctcagtatttgtattattgtccttgcgacttctacgccaaagagatcttcgccgtatctgtcaatatacgccttgaacttttccatattgtccaccatctgcgccgtgactccaattaaaaacttggtacagatttggaagagtctgttattagccagctccattaagctttcaattttcgccactttcagattctgctccaacgtgctaatcacgtttcccaccgactcatagtagtataagatcaatttatcgtctaggacagtttccagatttccaactgttgatattaactcgtccacgtataatctcccgtctactgactggcttcctatgacttttctacaactgtttgttatttttaaaaaggtctcgcatgccatttgctgtactcctgggaatgtctccctcatgaactcaaataacttattcaacactgtgttcaagaaccgccagttagtttttaaaaagcttgggtactggccgacgacatacattatattcgaggccacaatcgccttgcttgagatttcattttttatctcacaaatgttcaataggcacttgatgaccacgactagaaaccgcttttcaaccgcctcttccatacttcccgtgattgatcccactgagtaacagagcctgttcagtgtagttggatcccagggctcgtttccgccgatatttgcgtgttccatctcattgtctaaaaacgccttcatgatgttttcagaatcctcctgtaacattgtcgttagtatgatttgcgtatttttcattttattgtatagtgcaatttccgcagtgtttgggttatactctctcacgacttccccagagtccgcgtcgtacattatataaacctcctgcggctttgccatgcgatttatcattaccttctggacttgtattaaaatcggtttatacagtctgagtctcaccagctctgccgacgagttcaggtcaatttggttcatggcgttgatgaccatgtagttcgggtcgttggtgtctctaattggcaaatttctcctctcatactccttaagttccctcagcagctgatttgagaaatgatgccagaaatccagcgcaatcttaaaagtttcctcgtggttgattgtggtgataattaccaacttctccagcacaaacaacagcgagtctctgctgtttgggatcttctccaacacgctctccctaaagtttttgagcaaattggtcaaaaacagcgtcaattgtgtgtaaaaggtctcccagaacaggagcattgagggcggaatctttgcgttgtcgtactggaacgactctggcggcagtgttgacactttctgaacaaccttaggccacagtgacattatccgatgtgaaaacgtctgaagctcgttattcgtcagcgttagcgatgccacttcatttaagcattttgtgcactcaactctgtaggtcattgggtcccagaagtggtccagcagtaagtcgagcaaaaccaccgagccttctccgtgagggtaagattcgaaaatgtacccgtatgggatccatttaaggaaatgtgataagcacacgagtgtctgcttgacaagcgtgttattaaccatgttcgggtttgaaatgaagctattgagtacgaatatgcaaagctcgaagatttctctaaattccgaggtcattctcgagactaatttttggactctcttactttgcattgaatcttccccaaagtcgaagatctcctcacttagcatgttcaggagtcgcatattattctcgcaaatgttctgtgaaacctgcgatgccttgcaaatctctgaaatgaagttcggccatctatctggccattctctctttactatttgtattaaacactcgttaactttggtgagaaagtggcgttcattccggcatacttcttcgtccatacataacttaattaccagttcagacacgtactgcttaatccccgcccgttccgtatccggcagtatattccatctggtttcaatacatatttctaagacttgcagtgcgtagaatttagtgttagaattgctcgatttggccaaaatcaaggctacatgtttccacgagtctggtagtttcttaaactgctctaaaattctatgcgccgtttctctgttttcgacactggttccgtcaaacatggatattattacggaatccagcaggggaaccatggcctcgtcaaacggccttgaggtgtcgagtaataccaatggatctgttaaattagaactcattgttttaggttaagctgtgttataaaagataaaatatcatatttccttaaaatcacaacaattattgttaaatttgggatgatctgaaatgcaagagttatatattgaaaaatagtgaaaaatcagggaatcagaaaccgaaatatctctggatattatttaaaatattttattgatcatctgaaatgaaatatttgaaaaataaaaatataaaagtgaattttaagtgatcttgaaaacagttttaattcaccatacccaaccttccaattaatactcaattgatcgattttaccaaattttattttcaatatttcacaatacacattgcatttatttgttttttaaaaacttccctatgtgacttttgttcttattatatccacgagagtttaataatctattccttttttaaattattgtcttacacattaatctctagtttcttgtttttcacaccttttaatcaatatatatcatttttactccaaaattctaatattaaattatttaatttagtcttgattagttatttttaactagttttaacacacaagttatgatacactgcccacttattcatgaatcttgtttctgtgtaatatataattttggtccatgttatatatgaaatatttgttccattttctaagtttatttaagaatttgggcctattcttgaccactaattccgttatcccaccatacacgcagtaccagaaaaggccaagaataaactgatactaaaggattctcaaaatatttagatagataatattatattatatactataaacgtttaggaagagaaatatatgttcaaataagcggttaaaacggttcttccgatataaaataaatgccaggacaaaaaaagttcataattgtgaaataatgatggaattagattataaataatataacgtagattaatcaaggggtagaataagaagagaggaaaagggtaaaaaatttatttattgaatatctaagtataacgaataaaatcgcctagagaaagaattaacgcaaatacatttgaaattagaaaatataaacagttcgaaaagtgctgatgtggatttggatgtatttaaaggggcggaagaacaagaatttttgtgccgtttttagggttcgaaaaatcgctcaaaaaactttatttattttctactagaaaaagattataaggatttattgtcatttataatatattcgaatgatggtaactgggttttgttgataaaaaatatgaactgacgagaaaagttaaaaattattcacaccacctggtgctgaccttccaaccgatttttccctcttaattatatttcgttttagttaattttttttaattttaataacattaattaactaaaacggattgtaattcgtgaaaaattaatgccttaggttttatatcatcaatgatatagttaaccctcatattctttattactgcggttatcctccagattccaaagcttaagtaataaggaataaaaggccatgtgaacttctctgataatttctgatcataaactggcaataacccaatataacactgctgattcacgatacacattgtatatcacattttaagggtaattgtaaggtattcagcagcttcacattacacatgaataccctatacatcataactcaaccacaataaagagcaaactttgaaattttttagttatttgaggttatttgttcacgcgatcatttatacttttggaatttatatattatgaaagccttcacatctttcgaatcacgaatttacaagacgaaaaattttaagttattttttccgtaattttaataaatcctattgattttacacattttagttgattttaagtttaatatgaatttttggattttaattttttatgtaaaatattctatctttcggaacccggaataaatgcagacctttaatttgttttataaattaaatggcaactaataggaaattatctgttcaaacaagatctatgaactcgtggaatcttgtcaacaacggccacaaatgcatcagtgaaaaggcactagataagaagataaacgaggcgatactggtgccaaaaggcaacaaaccaccagtttctgaagagaagagaacgccaaccactacggtaaccaacaactcgttcttctcgagctcaataaccacgagcacaacagcgaccacaatctcgacaaaacagtacaattattactctaacatcatttccagcactcttacgaacaatgcagtcaccaacacaccactcaaaggtgtgacggaaaattgctgtccctcgaaggacatctctccactcgcgaagagcccggaacaaaagaagagtaacaaagatatcaagtacaagtcgtacaaggagacgacacttaagtgcacgaagaatgtttgtaaggattttagttttcggactaaggctgttgaaaggggcctggtgggtgagcctttggacaagaacttcagcagcgtgctgaagggaaactatacgacgtataggaaaaagtatttggaaggccctgttgttggacgggggagtttcggagtcgtgaaaacgctcttcagcatggttgagattctggatttgtaccagttcatcccgaccaagctgaggccgccaattaacaatttatccctgggaataaagagactgagcgagaataggtacgagttctgcggagtcagcttgacgagtccaacgagagccgcgaagataatgaactttgacaagatcaagaagaccggctcgaagaacttgctccacattttacgcgaagtctcaattggctcctggaacgaccacccgaacatcgtcaaggtcaaggagatctatctcaatgaacagataattaaatacctcaacaacataaacaacctggatgaccgggaaatgatcttgactgggaagaacaacaacgtctacttggtgatggagtactgtagcgggggcgacctcagcaagttagtgatcgacgaggttaacaaggaaaacataatacccagaatatttgtgcaaatattcaagtcactctcgtacattaactcgcgaggcattgcgcaccgcgacgtcaagccagagaactttctcatcaccgttaacgaaaaggaaacaaagtctgaagacgctgaaattaaagataacgatgacatcaccgtcaaactcgccgatttcggactcgccaattcctcaccaagagtactcaaaaccagagcaggtaaacaccatctaattattactaacgcagttttgtacaattaaatataccatttaacaattactaatgtagtaattataattaactcctgtagtattgtatataaaaattaactttcggtattataaaaattaacacctgtagtaattaaaattaacagctgtagtgttgtgtataaaaatgatttggtgatagttttggtttaggtacgccgtattatgtggcaccggagataattaagtgtaacggtcacaactgttacagcgtgaagtgtgactcgtggtcggcgggaattatgttacacatatttctgttgggaacgtgcccgttccacgacgagtcagacgttaagaagttgaacaaggtggtgaacgaggaaatcgactggacacatcaaatttatgccacgataccacccgaggcctatgacctcctcaagaaactcttggtcaaaaacccatccaaacgaatctccaccaccgactcactcaaacacctctatttccaaaaattcacgggtacacacatttacacaatttacacatatttactcatatttacacatatttacacatatttactcatatttactcatatttacacatatttacacatatttacacatatttacacatatttacacatactacacatatttacacatattacacatatttacacatattacacatatttacacatattacacatattacacacattacacacattacacaatttacacacattacacaatttacacacattacacaatttacacaatttaatacagataatttagtaatctaatttatttattataatattatttactgatggcatgatgtgaatggttaatgtatgtgatagggtatgcgcctctgctccgaagtattaatggaaatacgttgattgacaagttgatccagttttacaagttcccgatactcaagagagttgcgttgtgcataatgataaggcagatttcggagtataagctggacagcctgacgcatatgtacaagtacctggtgtcattctcgcaggacttaaacaccctgacaataccatcattgaccaactacgtcaactactacaaactcaactctgaattaaacaaggacagcacgtacaacaacaagattgacaagctttactacctcaagcagtttctaaacattgacgagatagggttcacggagtttgtggcctcgcaaatggcctcagaactctgccagaacaacgacctgatagcaaacgtgttcgcaggactccactcggacttgccaggaagacgtagtctcttcatcaacgagcaggacttggcaaggctgacgacgagttacacgcacgattactcaaacctaggaattaacgctgatctggaccaggacctggagcttaagctggaagccgacgcgcaaatactcagcagcatcaaccacatcatcagcgacgcctgcgagtactccgacaagatttactcccagaataagatggaggggaactcacacggactcggcggatttctcaggtcaaccaggggcccagacaaggaagcctcaatgtcaatcgacgaattcttcctcatgatgagcttcaacctcattgaccactcacacaaggaagaaggaagacaaataagaatcaaaagaaaaaaagtcaagtaacaaaccatcctacatcaaccatgatgaggaataaagttaactaagaattgaggtatagaatgacttaagatgaataaagtaaactgagaattgaggtatatagtgaatcaagaggaataaatacaagtttgagtaataaagtgagttaatctgttgtagtgtgtccacataatgttttatttgtcattatataatgcatattaaatatgtaatatatgttagatatgtaataattgtggtaaaatttacttataatgaatgaaatggaaaatgtgaggatggcagacgagttctttggagatgagctcctgggaacaatatacgaagaaacggaagtttacatggagaaaaatccaagtaattttaagacgatcaacggtaaaagtataacaataaatgaaatagaagaacctgtatcaaataaagtgtataaaaacctggaaaatgcagttaaaaagcttggtaaatacccgctgaaatcaaaattggaggattccttgaggaatctcactgagtacatcaattcatacggatataggcccgaaaatgttaattattgtgacaaatcactgaaaaaatcaatagatgtgcttctaatcccattaatgagactaatagttgacactggacgttatgtgacgacatcttcgtgttctggaagaatagtattctttgaaaaggacagtaactttcagaccaagaataatccaatatacggaaggtcagggaggatattatacagctcccatacacacatcgtaagtgaatctctgagtaaaattaaggaatccatagagtcaaacccgaaaaataagttcaattgctataaattggagcaagatacggatgaggaggagactaaggatgattccggcccagcatcctcagaagataagccagaacagatcgaaaaccaggtcatacttaagtttgagccattcttgatacacgtagattgtaacacactagaagatgcgatttgcttactaaacatatgtaggagtgtgggcttgaaacagtctggattaagttcgtctaagaaaaagtatatactagcaataagaggaaataatattctggaggcgccgataatgtataaaagttataaagtagagaaagataagccaattctgctgaaaaatcaatatctaatttcatacgagtatttaatacacttaataaacacatgtaacgttaaaatgagtcaaaactttaagcagtttttatccctgtaccataaattagtaaggatttttaaaaacgatcaaattgtagtctcacaacacagtcaaccgattgaaaattacctcacggttgaaaataatcatcttgaaaatgataatttattcggaaataatcatcttgacaatatatttggaaataatcatcttgacaagaatgtagttgaaaatatgtctaagatttcgaaaaaggatgaatacattgatatgatgaagtgtatggaattggttggaagagatttgttgtttgggttggagggtgacaaacgagtagatataatgtcatttcacggagaatgtaatcagctgctgagaacgcactgctgtatggcatcatctaaagattacgttctggtgtttggaggataccaaaagtctaaatctaaaaccatttgtgtgtgtgatttgaacaaagtggaccaaggtttcaaagtgtttgaaataaatcatggtcctgaagccttactagactccactatactctcagacggaacagtatttatcacgtttggaggacgaattagcggagataaagcctcaaatgatgtttatatgctttatatatataatcagggagatacacaaataaagtggtctaaatgtcagttgatgggagagaaaataccagtagcaagatttaggcattcagtatgtctagaaaaaagtgatgaacggggatcggatggtgatttagaatattatgatagttctagtaatatattcagattctatatgagtggaggagcttcttcgtgtagcccactagatgataatattctaggagatatctggagatgcacagttgagtataaaattcaggaaaataacataataaatcccacagtacaatgggattgtctatacgaagataaatcgttaggttggtttagtggctccatggcacatagtccgtctgataattgtctgtatttgattggaggatgtaagaacttggatgaatttttaaagcctggattaaagagaatggatcaattagtggcattcaatttacagaataaaactgtaaggaaccaaaatttactcttgaaaaatgaaaatagagaattcccaccacttacaatgtcacattccctagttccactggaaaatgacgattattatatcgtaggcgggtttggatccttggcatttctggatgagatatggtacctaaacctaagtgaaaagtccataaaaaaggcgttgatgctcccaaaaggaaccagagcacgaatgggagcatcagttatatcctttaaatacggaaattgcaatcacgaggaactgtggataattggtggaggagtgccatcagtactcaattttgggtctttttacgacaaacccctgataattgtactgaattgcgatggtttatgtgaggaaaattcagaaaacacagagacaaacaactttacaactggcgacgtcgacaaatataaaattttaggcttatatgtggttgtagaggataaaaatttggtcaagaacttgaagaataaacttgagcttttaaatttgtttgataagagtaggaaaatctttcaatttaacgaatcagactatttgtatcatagcgtagcctgtgacaaggttgaagattttacagaatgttccgaatgcaaacgtgaagctttgtgtgtttgctgtaaaatctgttcaaattgctgctattccacgactgattctatctttttcttgccaattaaagcaattgagaactacccagaactaaaccctctaaaaaagtacaaagtctattcatgctctgatttaccagtaagaattaaacagaacccaagagataaattactagccatgtttaaagataaggaacttgaaactattgtaagaaatgtggaggtttttggagataatttgttgataacgcctgtgcggggtttggatttcccagaaattgattgggagtcagtttcaaaggaatttaaagtgtcctcagtggcactggtaggagaaatagaaggagaagagagacataggcaagtggaacttttatatggaaatggcgatgcttcaatacgagaaaacggagtaacatacattttcaatattaaaacaaacatgttctcgaaaggaaattcatcagaaaggtaagatagtttaactcatttttctttaggataagaatacaaaaaatgtatttttccgattataggcaccataggagagtacgagaatacaaattctcagatgagctaacaccttactacttcttagcctcaaataactatcatccaaagttgaaaccaattcaccattatgaacttaaggacttatccaaataccaattggaaggtgaaattatggttgatttcttctgcggaattggttatttcacaattccaatactgaagtatactgacgagaagagattatcaagggtgttatgtgtagatgtgaatgaaacagcaattaagtatctgatggaaaacgcaaaagctaacaaaatcgacctgtcaagaatagaagtaaaggttggcaactgcggaatgtttggaaaatcttacggatttgattacgttggggaggcggataaaattctactgggtcttttaccgagttcgagagtgggttggattccggcaatagcggcagttaacactatgcacggagggattgtatatgtacacggactatctaggaagaagaaggggccgattattgaatctattacaactcttgaggactgggaagaggttggagaattctgttacacaaccaaacagtatgaagaagataaaaaacacgattgcgactgtgaagtattcagcttgtacgtactgaggagcttccacgagctttgtagaaatcacccatacgagagatacatctcctggaaactcactgtgctgcacgtggaaaccgttaaacggtactcacctcacaagtaccaccaagttgtagatttaaaaataacgccagtgccctcataataataattcactagaatattgttcttttaatttaattattaatattttatccatcatcgcataaattttatctaaaatgggttcgaaacatcatccagatttagtcatgtgccggaaacagccaggaataggtaattcccaatcttccataaataattataacatataaaattcaattatttaaataaatataaactataattatttaaacaggtataattcacacctattataataattagtactagtttgttagattaagaatatgttagaatttttagcgattggaagactctgtgagaagtgtgatggcaagtgtccaatttgtgactcatatgtaagaccaaaccttttggttagaatctgcgatgaatgtaactatggaataaaccaggtacatacacccttgaaaatttaaatactcactaaaaagttaaatttccagttaaaatatttttagggaagatgcgtaatctgcaatgggcctggaatctcagacgcgtactactgtaaatcatgttgccaatgcgaaaaggatagagacggttgcccgaagattattaacctagggagtgcaaaaacagacttattttatgaaaaaaagaaatacggacaaacgaaacaattcttttagcatttcttgtacaatattttaaatctgatattacagattttacattatttacctgcacatcaatttacaccaaatagccattcttcttactataaactgttgtatttcattgatttcgttttattaatcttaagagctaaaattaagtgtgtttttgattttattgataaagttatttaataatggtgttatctacgtggtagcatcttggaatcatgtgctcagaatattttatgtatcgttcacattttccagtttataattccacaactacaattatgtcatttattcactcaagatggcatcaaacggtgagacggaagaggaagttttcttccaaaaaaagacaaacgctttcaattcattagtggaggatgaaaacgatccttccagtgaaggtatttggaatttgacaaattcaaatattaatacttaaatttatttccttcctttcgtaatatttttattttagaagagaatcacgtgaaaacaaacaatgttccatctaccccgaaaacaaaaccggtatgtttcctagataaaacgagttaaaatttattcagaatgaggatacatcaacttctaaacaaaagggaaagaaaaaggtattttttcaatgctttaatcacaattttagaaggggaaggccgtgaagcaggaatctgacgatgatgagttcgataaactcctagcagatctgggcacattagatgtaaaggtattagattagcttatttacatatttttaaccattatattaatttatttaaaatcttaggataatgagaaatctgctgccaagcttgacgaatcctcgaaagagcctttagataccgaagaacctaaagaaacgcaggaaatcacctctaaaactctaaagaacaaacttaagaaggagaagaagaaacaggctaaattacagaaaaaggagtctcaagttgaggaagttgaggagaagcctgtcgccgctcccaagaagccgctctcccaggctgcaaggatggcggctgaagtccagcgtaagctccgagaattagaagaacaagctaaaagagaggaggaggaaaggctgaggatcgaggaggagcaaaggaggtaacctcaattattaaaataaaatttgtagaaaagaggaggaggaagagagggaacgccttgcaattttggagaagaaaagacagcagaggaaggagaagagggagcgtaaaaagaaggagggcaaaccaacttctgcgaaggaaaaagctgccgctgaaatgagtaagaggttcctggaacagtttggaaaagccattctagaggaaaatcaaaacgaacagcctagaaaaactttagctcaaaaaaagcctaaacgagtgaaatccgttcaatttgaagaatctgaacctacctcaaaccaacagcaagaaccaacttccgatgatctaaatgaagaggatacaggtaaccaatttaatattcatttataaacaaaaattgtaaaaatagtttaaattgttttaacgatactttagtcagtgaaagtgatattgataattgggaggacctcgaagatgagaaggaaactaaccaaattattactccaaaacccgttaaaactgtaaaatatggtaatactccaactaaaacaataatagttataataatactttgataataaattaatgtatttatagttgtgaatgaagtggatgatgacgtttatgatttcagatcaccgatttgctgtgttttgggacacgttgacacagggaaaactaagttacttgacaagataagacatagtaacgtccaaaacgcagaagccggtggtataactcagcaaatcggagccactttcttccccaaagatttacttgacacacactgccacaaggtattattttacccactattgttaaattattttacccactattgttaaattattttacccattattatatatttttaaattatctaacccattattataaatttttaaatttggtgaaataaaattaattttcagattgatgaggaaatgtgtgtaaaatctcctggacttcttataattgacactcctgggcacgagtcgttcaataacttgagagctagaggctcttctttgtgtgatatcgcgattttagtggttgacattatgcatggacttgagccccagaccattgagagcattaaccttctaaaggccagaaagtgttactttataattgctctcaataaaatcgaccgtatttacaactggagttccacgccctggcagacgttcagggagtcgtttgcaaaacaaccgaaggagtcgcaaaacgagttcagtgacaggactaaacaaatcatgctcgagttgagtgaaaacggactcaactcttccctttattgggaaaacgataacattaagaagaacgtttccatttgtccgacctccgccattactggtgagggcatttctgaccttctatatctcctcgttcaactcacgcaactcttaatggccaaacgacttacattttctcaaaaactcaagtgcactgttctcgaagttaaaaccgtcgaggtaccaaatgccaaattagtttatttatgtgtggtattagtttggtatcatacattagtttactattactactgatttacatatgtaatctaatgtttttagggacttggagttactgtggatgtaatattattggatggaattctgagagaaggtgataggatagtgttgtgtggtttatcaggtccaattgtgactacaatcaggaccctgctgacgccacagccgttatctgaactcagagtcaagggcgaatacgtaaaacactcacacatcaaagctgccatgagtgttaaaatcgttgccaacgtatgattcataataattataacattagcacaattataccactacaattatactactacaattatactattacaattacattagtataattatactggcattattatgctatatttacattaattttatggttgtatattgtgttttaatatgggttttaggggctggatgacacggttgcgggaacggaactgtttgtggttggcgagggtgatgatgttgacgagttgtgcactgaagtcatgagtgatatttcatcgattttcgactgcattgacaggacaggaattggagtgtacgtgatggcttcgactttgggttccttggaggctcttttgcactttctaaacgataagaaaatcaagatttactctgtgaatattgggccagtacagaagaaagatgttaaaaaggcctcaattatgagagaaaaaggccatccagaatactctacaattctcgcgttcgatattaaagtgacgcaggacgctgaaaaagaggctgaggttctgggtgttaagttactttcagctgatataatttatcaccttttggactcttttcttgcctacatggaacaagtacaggaggagagaaaacagcaacaaatccaaaatgtagtcttcccctgtgaactgactattcttccccactgtgttttcaataaaaaggacccatttgtgtttggagtccacgttgatgctggtgttctcaagtccaacacaccccttgtcgccattaccaaaacttcagtatccttatactagtttccgattatcagtgttaaattatataaataattatttatatagattattttatggattacttgtattgattatttgtatagattaattatttttatttagtggtaaaaattttttagcaattatttttgggtcgagttgcaagtttagaacataataagaaaccagttgaacaagctttgaaaggtaccttcttaccatcaataactgcaataagataaattactattaccaaatgaattactcacaacacaaattactattactaaataaataaattactaaataaataaattactaaataaataaattactaaataaataaattaataaataaataaattattaaataatttaggacaagaagtctgtattaaggttgttggtgaaccgaatgtcgcttacggacgtcattttgaccacactaacaaggtctactctaagattaccagagagtcaattgatattctgaaggagtactttcgggaagaagtctcaatggtatcttcgtacaaatagataaaattgtgtaactaatataatttattaggacggatggaagttggtggctcagttgaagaaggttttcaatattttctaacaagtataaaactattaaattaacttgtaaattatatatttcatgactgcagtattcatagtatacaatcatttctttaaacgattcaaacgatttctacattaacgttacccagctcaacatctatgttgctttccaattccagctccaaattatcaaaaaaggcctccaactcaacatttgagtcaagatttttattattctcgaatttgacctccgatgtgtccttagggggttccagtggtacataagatcctagatcctcagtgttctccaattcggtgtcaggtgataggtcatgcggttccagtcgtaccgtagaatcgagaattcctgtcgtaacttccagtgacacctctgaatcattttctgtactttccaatgggagtactgaatcattttctgtaacttccagtgacacctctgaatcattttctgtattttccagtgggagtactggaacactatcctccgtactttccagcggtagtttttgatatccagtgtttacgggggatactactgggtcaagacttacagaattacccgattccatatctaaaaacgtatcttgagtggagctgtccactagaaatcttgacttagggtccctaaaggactccattatcattcttaatttgtattcactggtggtttccgtcggtacttcggggtctagactttgggaagagacatcgcattcagagtatgaatcatcgtaatctgactccgggtccctgttgtaggagttattcggtgagttctgtgaagtggaagaggagtgagtgacaacatcgttgagttcctggacgtcattttcaggttctcttgacgcgtttttcttggattgtttctccttgtccttcttggatagaatttgggtaatgttagttctacaaatggggcattctgaactacgtttgaaccatttcttaagacaatctctgtgaaacaagtggcgcatatcacagggtaacaaaaacaccttgtcaacatcatttatattctacaattcaattaacaatatcgtagttatgcataatattaacagtgtatagtagtagttaaaggtataaataatattgataccatgtagtagtaaatggtataaatcatattaataatagtatatagtaattaaaggtataaatcatattaatagtataatactaaaaccaagtataatgttattaataatagcataatgatagtaaagttaaagatgtgtaaagttaccagaatacaaattgagcagagatgttcgtctagcatttcactgttgttaacacactcaaataagacgtctttggggggtttagacttagtttcagagctgttctgatcttgctgagaatcttgggaaactgttgtttccgattcagaagtgttcgtgtagttttcgcccaactcgaccgactcctccaagctgtcgattttcttcaaaacgtccctgtaacgctcaacctttagcttcttcaggaggctaactggcattgcggtggatgtcaggggaattgagccatgtctgaagtaaatcacgatcaggagagtgacatagaggagaatgcagatgaaggtgtaggcgagcatgggcactacgtaggaagcgatggtgagccaaagcaagaagtaacagattctggaggaaacagttttcaagtcttcgcgaggtgaaacacccaaaaatacaactgtgaggctgatccataggatcgaggctatgttgtaaaacgtctggctcagcttcaggttcggtccatttctcgccccgatgtaatggtacctcagcgaccacgagctgttaactgtatgccaaatagctctcaaaagccagcaaactatcaacgtttccgaaggcctcgtctgaatctaaaaaatggttataaaactataggactaattatttaattatagaaaattctaaattgttaatgtaagattctcaaaattttgataaaacaaacaactaaataaacataattatgataaaatagaaacaataattatttaatcaaacaactaaataaacataattatgataaattgataaaaaattatgataaattaataaaaattgataaaaaactgagtaggaagggaattaccttgtaaaatcttatattatagtaataaatagcgaaagaagttaaaacaacaagggcgacgaggattaagaggtgaaatgacataaggcacttgtaaacaaaaatgcggttggaaacgttagagaaagaatcattggaaatgctccggctaaagagaattgaaactagaggcatagatctaatatattgaatcagtctgttgttgttttcggtcatgtcggttgaggtttgcccggggtctgagggaggcgtttcagcctgaacctcaggatcctggacggtggcggggtctgtttcgcaagtttgagtggccatggttagatttctagaaaaaaacacttcattttacgtcaaacattttaggcgttaagcttaaaattttgggattaaatctttatatggcagtggaactatggagacgttacattacagtgctggtcaatttgaatcctataaagtggaaaacaaaattgcatattcatacctattggaatttggggaaataattaaaattgtggacgttaataatataaaatataatactaaaatgacatcaaacccccatagtcacaaggtgttgaatttatcacaatttgaaattcccctgtgatgattttacttaaacaataaccacagtttaaggaaattactgtaaaataattttcgacaacgtaatatcataattttatctaataatttgaaagggattctaggcgacaattttatagtagtatactaattgtgtaatagtgatatggtaataatataatttgtgatattaatatttaatatcatttatttaaaactgagagttcctttacaattgccgtcttacacctatacagcttcggtacccaaagggccgtcctatatttgtatgagttgaggaggtgttcagtttccagacgaaatgtgacccactaaattattttttaatcgtatctaagctcaccactatacgtctgaaaatctccactagtgatattataaacactacgatgttgtgtgacagctcctggtgctcaattagctttattggagtcaccgtcagtgcccaggttagtctacataacaggttcaccacgcacgctatgtaatacgctttcattctatacatccttctatcccctctcctattacattttacacatcccttacataattaagcatactaaatatatgaaaactaaacagtatcaacagaaattaactttaaaactaattaattaataccttttgaagatgttaagaggaggtgagagaccccaatctacgaaaaaatcccagagaaagttatagatcgtagccacaacgtagcaggaaatcatgactacaagcctgttgtttccagaacttgggggcctaaaaaacatatatagttgaaaaagtaccacttcagtgatgaaaccaccacgcagataattccagaaatgtacttgagcatgtttccaaagtggatccacagatgctcgttgatatacctaagaatatgtttattagggaaaatacctaagaatatgtttattaagaaaccaaccttctgaggcactgtgagaacctgagaaagaacggggctatcataactgtcggaatcacccaattgatcacgtctgaaattattttttcataaaacagccttaccttcatgcacatggtgtgtatcattcgataatccatacctaatcaaaaattaataaaactatgtaaaatatagatgtgtaaaattaaaaccaattatagcataaattatgggtaaaataacagtaaataggggaaatagcttgatattattattactaacgtgaagtatgagaagatgtagacaatgtcgacaaatgatcttgtgagtgaagtgtatacatctgcgaaaatgctgtctgcaagtgaaactggcggtccaacacagattggggaagtgaatgatctgaagattgcaaatagcaatttcctcctcaacttgagtttaaagttcttctttggaagcaggacaagcatcaacgagcaaacgatcaagattattggataaataaagtgcctaaaaatttacattcgaaggtaaaagtacagtttatgttctccaaaaaagtttattttacaatccaaaatgaaaaacacaaacaacaatagacacactaacgactgtaatgctccgaagaaatagaaatccttctcatcaaccgaataattattactcaattgaaacaaaaatctgtcaatgattaattatatataaattaatggacaaattgtaggtaaattacaactaaatagtcttaaatagtaactaaataacggctaagttattttgaacgtactgataattgactccatatgtttctaggtagttttggcaccatccgataccacaccagataacgccaaagataaaaaagactctaaaaataggcaagtgagccaagagaagtgataaattaaactcttttccaaagttagcgtaacataataaaacgctcataaagaacagtatagtacaaagtcccatcatgtatgacaggtaataggctggaataaaattcgagtccattgtagattcaacttccattttcattttgttaaaatcaacagcttcaggctcagaaattagctgatatagcgatagaattgcatgattcgtctcattaaatgagtcaattgatagtaaagtttgtttatatgtcggatataaagaaatcaaatcattagttcctaggagcttatccttcttttttaaaagtttataaactgctaaaatatttgtgtttagataggatttcagcttatctgatgaatcccaaagtgctgtaactgctttttgaagtaacttgacgtgcgatttatcaaattctcctgatctgttaacgacatcttttctcaaataatctatcaaaattgtgatgtattccatttctgaattgtaatgcattatcacagtcctgatatcatccctcaaacacttatcaaaacaagcttgggaatctggagttgtaatcttcttatttccaaagtatcttttattaacttttgacgctaaaaaattattaatttaggtgttacttaccgaggtcatatttaaagccgcccagatgccttgacattgataaatttttggatgtcgccttcctcacaaatttgttcttaaagtcgattttcctcaagtttctgtgtgtttggactagaggtttcgttggagactgagtttgagaggaaggtctaaactcatttggattttcaacttgtacatttctcaaatccacgctactgtagaagtttctttggccattggtttcatggtctaaaatatcaagtttagccattgagcttctgaacttgtcgctcaaactacgagttttgttaggtaatgcatggctcaattccaccagctcaggtatctgctcaaagtttaagtggcccttttcctcaaacgtttctgccacgattgttatcacatctaaaacattcttggacttttgtgatgttttaaaatcttccaaatttgacgatgacttataatcttcaaaacgtgatgaaaattttcgatcttttaagttagaggaactaaatgtgtcagatataggtacggtgtatgaatcaggcttgagatctagaggaattcccatattatcttcaggttctggaatttcaattgataaatcttgttgagaagaagtttgttctttaattttatcaggttttccaatagatttaattttggaatcgtccaaatctaaggcaaaaatgttactctggagttccaaatcctcttcttcttcctccttttcactaattttaaatctttgtgctgattttagtaacctgtttaggtacttatatctgatatatttatcggcccattctgaaatgagaaatgtctccaatttcgagccgaacttcatttttgcgttttttggtatagaatgtaactaccttcataaaattattaaaattcataatatgaaaaaactactaatgttacaggaataaattaaataaaatagctccaaagatgattgacccgctattcaccttcattaagatttttttattcctaaatttgattatttgtttttaaaaaattcctaaatcaattataaataaattgttacaaattaattcattttattcaataattttgataaatgtgtagaatattcaatactcatcttcatacattattttcccagtttcctcatcgcaaactttaaaatattataaaattataccacaatatatatggccgaatgtaaaagtattgcacagttcaatttagagtcacagcctgactgtattagggtgttcccctttgagaatccttcaggtattaacgatatctgtttatctccttttagattctatactttccggctcctttgtagtaggttgttaccgctacgatgaacttcgtaaccacagagaaggatgcctcctcttttttaacccttcaaattaccttaaccagtgagattactattattttaccatttattagtctgttgtctggattttcttttcctaaaaagcctgaactttactactttggtcatgatattggtggtattttatcctgttattggaccaaatttgatcaagtttctacttaatttattgaaattttatacatttcagggctacgccatttcctgtatttctaccaagtgtatactagctcaatattccatcaagtcatcaaatccaaactcatcagaatcagatggacacaaatttgaaatttctaaaatcaatgagataaagttaacaggggatcctcatacaattcccctgtcattatcaacttttgatgaccatggcaggtttatatgagtgtttttattgattattagttcaatgtgtgttacttgcgataccggtcactgttatgtggttagaaattccgaagttataaactggcaagtcctcctccttttacactcagtttaggcgagcatgcaaatttcaaacttggacaagttcatttcaccctgaaaattccaatttaatccttactggtatttttcatataaaatacttgttacttttaataaacccacaattcaatagctattttatatcaatttccaggttctgatgattctaaagtacgattgtttgatcttcgatctggatttgatcaaattgattcattttcctggtaaaattcatccgttaacaaatgtttagtcacgaatcgggagttacaacaattcagtttttgcctcaatcaaccaacttattctatactggcgggtatcactaactgttacatgtaaacaaatattctagattcgataaggttttggttaaatatgatttccgaaaacttgtcacacatgttgaatcacttaaaactacaactccaatttggtatttggactttataacctataaaaatggcactctggaatcacttcacgtatcaggatgtcatgatggatccgctctttacaacacttcaggtacatattaatattcacattttccaggcgagctcatttccacattcaaaccaccaaactgtctcatctactccacttctcacgttaaactctcatcaacgttacttacctcttgtgatttctataataaaagtcttcatttctacctctaattacactattaatataccatgtattttacaccactatacatacagatgtcataaatattaatatacatgttagagtatgcataaatagattagtagtgtgccctaaatctgggagcttggttaatgttgtaaggaaggtgtatacacacatagttgggattgcccattgaacagtgataaattccccaaaacacgccagcggccggtttgtgttcgtccataagcttgaatggtactactacggctttttggatggaaattgagagaatcttgaagtgacgggcatttgaaaataaaagacttcctgcagagtaattggttaagataaccttattctcgtggtcttttctattgatgtaccggtaccagtcttccaaatttttaagcttgtgcttccggtggactacaataaaggtattgtacgagagaatggggaccccaagtgtaaccgtttcagtgccaaagagtatctttgatgggtaaggatcctcaatcataaagttcatgccagtcatatggccctttttatccagtaaatccttcactggagatttggaagttacatactcaatttcaattgcatcagacccgaagttgcagtatctacgccttattatctccattgccacagttagaacgcggtgatgaaaagctttggagaatttatcaataaaactactatactcactatatgtattaggataaaccaggaccatcaacttcccccttttcaatacatcttcaaggtcagaatactcagtttcatctgtactttctattagactacttttccttaaaaactctttcaacacacaattttgtttgtagttatcagctgcacattcctcaggactcaactctatttttgggaaaagtttacttgaaaatgtaattgctgcatctcttaactcttcacctcctatagtaacctcagggtgtacatttcttttcaagtttttgaatccattatactcatatattgtgtccagttgtattttatccaaaattctaacgtccttaatgtacaaatcctttttacttttctcctcaaaaagcatgttaaataaaaatttggtcttcacacgtttcatcttaaagtgttccgccaaaaagtccacaattccagtctcctgcattattatcatggcagctgtcatcgcctgggctagtgggcttctaaaaggatgaacacttggcacaaacccctcttttaagaatgttagaaacttcttaatctcctcagaaccagtgcccaattcgtaataattattaggctcaaataactcgggattactgtacaagtgctgattccagtaatttacatcaccctcacctttatcacctaaattttcccctaattcacctggtttgaacgtattttcaagatcttcaagaaatgctaacaagtatctatcatttttagatgtgctaggcacgtttttgttaaattcgctgcctaaatttattccctgatttaatggaatttgtttacccttttgactaccactattgtcatattcaacatccataaaattatcttcatcactatcaggcgtaatagtagcactgctaccattactattatcattagtgctgttaatagtagtagattgaatagcttgactatatgatatagcgggtttggtatacgattgatcaacttcactatatggttgtaaattttctgcactttctggaggttcggttactacttcaaggtcatccaagtttagatcccagactaaaccttctgaatttgtagggaacaaactgtaaaattgctgattttcagactgaatttcattgataatttcaaaaatcggcacattatccaggatttggttgaacaccttaaagaaaaatgaggactcatccttcattttttcgtcaatgtaaagcaatgcattcaccatttgtctcctaaattcaactaaattatcataggttgtgttgatattaaagtatacaaaagggcctccttcatcaatgcttgctctactaaaaccatccgcaagtttggttaaaatatcagttaaaagtttatgttcatatttcttgtagctttcagtatttttatccggaaaaatactcacaatgaagtcgaacttttgaactattaacttagattgagtgtgatccgccttttcctcatcagagctgtagtcatcatatttggaacctttactttcagaaacaagattaataggtttattttgtcgctccggatttgtttttaaacttcttgttgatccttctccttgttcagatatcaaaccagggccgttatcttcctgtaaatgtttatttgtcggtccacactcactaatcaatgccacaaacagaatgataaaaccgagaaagtatttgaaatttctaactactggttgaaaattcattactaatattatctgtttttatatttttaacgttatttttggaaatgctgttgtttcagattggcgaatgaattggaattatctgggttaaaatttgttataacttagttaattagttttgtaaagaatttaaaaagtttgtaatgaatataaaataaaatgaggataattttcttaatgtacaagcgtaagtggagttagctagccagtgaatgcactattggtggagaatcaagtacctaactgataaaatattaaattattaagttttatttttttaaaaaaagagaaaattgacaaatgtgtaatgaaattaatagaatagttaacgttgattctttgattaatggattttaccaatttttcagttattaaattcttctaaataacataatttttaaaaattaatcattacttttaaattagaaattttttaaaattttaaaaaaattattttatatcatttatctatataggtagggctcgacacattgttcataaagtttatttttttagatatttataaatttagtttttatgatattgttttataattctataaaaatgttgaaatggataagaatccatcatatattaattttaatgggactcagataacacttgtgaagttagaatttgacagtagtaattatcttgattttcctgatgtgaagtatattcaagagtgtgtaaaatatgttaattcaatcaaaaaaggcgattttgattataaaaaagttttcaacatacaacaaggtaattttacacgttttcacttaatgtatttattttatgactgactaattattatttaattaggtacaatatcctgtttcggtttattggttacacatttgggagaatatccatcacccttttggtttgaaaagtacagaaatttgttaataacttcatttcttttaagggaggaggataattatccttctaagcttaacagaagtgataggttcatttcaaatatctttccaggtcataaatgtttgattaactacgaaaatgaccccttcgttatacacctaaaattcatcggaattggtacataatcgtattttaaactgttttagaggttagtgattcttctgttggaagtcctttggagtttgaacttcacgcagtcccaaacgactttgacacaaaaattaatgtagtttatgacacttctgtcccttttcacgcctttaaacttggtggccatttactcattaaacagactctacaaatcgatttactactcaaacatgaccatttttatctcaaactattcaaccatcatggtaactttctcataactattcaatattacgggctataatggattattagagagtttggacgttgaacttgaggatttccaaatcagaaaacttctaaacacaaattctacagtatctatatgataatagttaatagtataatgctgtagattgagttaccgttaaatataaaacatggaaatcaactaaatatagcacttccaatcactaatggtaatcttacattactattatttcttatagattttgatgagtttgatattccaggaatcttcgttaaatggtaatccacaccattatactattacataattttaggaacattaataagtggaaagatgaaaattgctctttatggacgagattagaatatacaaactatcaaccaactaacactagcgttggagatattacaataacttgtaaacagtagccgtagttaataatattataggtatattaaataaagtttatgaatcaagcataacattattgttggaaataatgagcaagaagaggatggatttgagtattaaaatgattaaggaaatggagattaacaagtataaaagtttaattccatttcaggactctgttgagattggagttgttgaacaaaatgagcttaaaacttgcccggtgtcgttctattatgtgactgaagggttacacacctcaccaccaatggaaatctacgataaactctcaaacaaagtatacaaaatcgaaccaaaaatcttcaacatacacttaaactaactgcataaggttcacattaaatttgtaaaattgattaagtttgtaaaatagatgaaaattagtattttcagaataaatttgataaattatttaaatgtatagaatttctagaatattttagaaattattattacgtgtggtgtatttagcacaattggagtagaaaattgaatagaaattggaaatgtaatttttatatcattttaataaaagatgtaaattttaaaattacaaaaatgtgtttgaaattgtacacatttattcttttcctgatatttccaacaacatcgcataaggttcccattttcttcacaaaactctttaacactgacacacatttaacccatttaaacagccctgaacagaatctacaaccaggaattgaattccaacatcctcaaacaacaaaccttaatactactactaataacaatgtaaataataatataaacaacaacaatactaatactaccagtaataacaataatttgaataataatgatgtaaacaatgtgaataataatgatgtggaaattggtaagaaggagttatctgaagaggcatataagttgaatgaagagttaaagaatatggacgaaacaaaggataaaatgaaagaactagaaaagtaagatcaaataatataaataaaatttcaggaatgaggaggaattatctgaaaaactgagagatacaaactatgaaaagctgagtgagttagtgaagaagaggaatttactcttgaataaaatctcagaaatcgggaaaacactcaggaaagaacacgacacgttctatccaggtacaaataatgcgtgttactgttatattagagttaagggagcagcctataatactcattgccaaatccagccaagatgataaaagaaaagcaaatcaactggcacacctacaaggtataatattaaccactgtggtatagtaaaaaaatgaaaattgccaaaatctgtagttgaattaaatgaaaaatactttataatatgtaaatcaactatcttagccaaatttactctaatttttcaaaatactcaaaattctaccaattatactgtataaacctatatttctagggtttgaggatgtgatgaacaggataacatcaccatgtaatttaatggaggaattaagggaaaaatcagtcgacaaaaagtaatacaatattaattattaaaaatattatcaacaatattatatagttagtaatatagtgaatagaatggttgatgtagggatgatacgatgggtaaatatgagagagagcagaaggtactggattcaatgaattggaaggaaagacttaactatggtaacccaataacgtgattgattaatgtatattagacaataatatgatcgagcattatgagtcaataatgagtgaaatagaggaaggaatacgtcgagcggaagaggaaattgaaaattcttggaaccagtttatacatcaatatacattttagaatcatatcgccgagttagggcaggaaggaattggtgaggttgggatgggccaaaaattggggaatcaaaagcaaccattcaatatataagagattaatttattgaaaacatatataaacaattgtgttatgtctatcattattaattttatatcaaaccacacattatggggtctcggaaacaatatatacctaaccccttcctctcaataataatattatatactcatcactatattattattttattcatccgtttattatttttttacgcaggaattaccatacccttcttatgacctatacagcatttactatatcttttttgacaacacgacattatactattattcaatattggtttttgtaagatttttagaaaattttcattcattccattcaacagttttatttcacgattttaacaagttaaactaatatatcaaattgattgtaagaattttagaaactaattgtaaggatttcggaatttaactaatataaagttaatgtaagatttagaaaattttaacgagtaaaaaattgattataggattttaaaataaaagttgtaagaactcagaaattcaactaatataaaattatcattgtaagattttagaaattaaccacactaaaataaaaataattacacgaatataaagattatttacgagaatataaattaaataataagaatataaagattatttacaagaatataaagattatttacaagagtataaagatttgcgagaatataaaaataatagagattaattgagcatttaaaataattgtaagatttagaaatttgaggaaaataaaggttttgtaagtatttgagatttttaaattaattccattaatcaatagttggaatttgacaaattatgtattggaaactggaatatgtttaatccaagaccatcaagtggcatcagccacagcttttccaaatcctcgagcaaactcgagaatacaaacaaactcgatccgcacccccaatcggcactggaatcacatatcacggatgctccatttcatgcctctaagttcaagtctaacccgaaggatcacaattttagggacttcacggttaatagagatgtgaataactatagagactatcccgtgaactatagagaaaactctgctatggaaaagagtactgagatagccagtggtatggatactggggtggtgaacaacagtatgatggacatgagcatggagatgctatttgggtcgaacaagaatgtattagaactgagtagtgacggagtatttgagaaaaattatttattacgtttgatgtttacatttgatcgtatgccacggttaggtaacaggaggacaggttctgaaacgctgagatttcattctgtggatatatcagtaggaagagaacaacaggaaaacttctatgacaagtctgacaaaatgaaaaaattactctataaacctctttcaaaacgtttcttaacaactaatccattggatgctagactagattctggattactagacactaagtttgcagattccaagtttccagactccagactagtggacaccaagttccttgattccaagtacttaaattcaaggttaatggacaacacaaggatgattgatgataagttgatgaaaggtgtgaggaatttaggtataaagcccatgttacgtggcgaggataatatggaacccgataaggaattccaaggtttcaatgctcatactaatactaacggcagtagtgtgatggacatggtgaggcatttttccagagaatcacaatcaaatgagttcggccatttttccaagatgaacagccatggcttcaactccgatcataaactgacaagaacatttttcaaaagagaatctaacgatcaatccttcacaagacaattttcaaatagagattctaacgaccaatccttcactcgtcaatttagtaatagagattctaacgaccaatcctttacacgtcagttcagtaatagggaatccaatgatcaatccttcagtagacattttactaatagagattctaacgatgtgcaattgactagacagtatagtaatagagaaaacaatacagatgtaaagttgagtaatttaactagttcactagtgcaaggcttgaacactaattctttaccacgtagctctagtctcaacgcatttaatctcaatacagaatttagtaaatcgggattcgacactaaatcaggatttgacaaacccgagcttaccaagtccggatttgacaaatcagggtttgagaataaaccagtgtttgatgccaagagtggatttgacactaaatcaggttttgataaatctgagtttaccaagtctgggttcgacaaaacggggttcgacgctaaatcaggtttcgacaaaacaggatttgacaaaaatgaatttactaaatcaggttttgacaaaacaggatttgataaatccgagtttaccaagtcagggttcgatactaagactggatttgacaaatcaggatttgataaaaatgaatttactaaatccgggttcgacactaaaacgggatttgataaaagtgggtttgaagtagattatatgttgagagataagaaaaacgaaggatcgaagtcatttttggaaaaattactagataagccatttgaaacacaccagtcacatgcgaatactagtcctaacacaacaaccaccaccaccacagccactaaggatatagatgtggatttggaaaaggataaattgagcccagaaagcagtaagccactgtctaacactaacccgctaacaagcgctaatacgttaactagtacaaaaccactaagcatggataggctgacgtcagaaatattaagtagtgataggttgagttcagaaaggctaagttcaaataggttaccatcagaaagattgggaatggaaagagtaggaaaagaaggcgcatttgaagatatgaagtattggaatggtgtgaatttgcaatggcagtatatggacccacaaggcatggtgcacgggccattttcgtcagatcaaatgtatcactggtatgtgaagaacttctttcaccagaatttacgcatgaggtttaactccaagatgccctggatgccattcaaggaactgttttcaccaaattcaataccgttcaagtctctgcccaagttcttcctacacagtcccaacttgcccccagtcacactgccaaactctaatctcctcacatcattcaccggcactaatactaatagtggtttgatggcaagtaatggtgttggtggattactaggtagtaacgccgctttcaatactggcttagcaagtggcggtgttagtggactggcaaatccaggagttacagggttgggcaactctggagtcagtggattaatgggaaataatactagtttactaagtagtaatagcggattaactagtaatagtgttggcggactgggaagttctggagttagtgggttaatgagcaatgccagttctagtatgagtaagagcatggataatgtttggaattcaagtcagagtacagtataccccatcacgtcaatgggtaacatacacctttctacacccaagttgtctgttaatcatttgaaatcaccaactaccactcatgctcataaggactttaccgctactaaagattttactaccaaggatttgacaagtactgcacagttaactaccatggataagagtaaggagttatcaaaggagttaatgagtgacaaggatttgagtgccaaggacttgaatgcgacacagttaacaagtagtactaaggatttgacaagtagtaacgagttgagtagcagtagagaaatgagtaaagtggagaagaggtggaacaccacgacagtggaggtgagttcactaatggagataatggagttggaaaagaagagtgcaaaggaaaggagcgtaaagtcgccgccgagacagccccaaactggctggaacatgtctgacgtcgctccaaataacttctctgaaagcgatgacttcccgtcacttgcaaccactgcagacacatcttcgtcaaagactgccaaggaaaacgttggcaagaagtttggaaagcaaatcacgatgccgctggaaacctttatagagaaacacccaatacaacctcctcacctaacagagtcgttctcatcaaaactactcggtaataaacattaatctaacacactctatactatatctttataatacagtgtagtatgtagttatagtattagtgtatagtgtattagtttaagcggttaagtattaagtttacagtatcggagacttaaaatataactgacgtctcttatactttcgttaacatccatattcttagctaatgtcccgattatattttgacatggtttgacgcagcaaattcatagaggcgagatcctaaaaataaaaaattgttagaaatcgttaaaaataccttttcatagtcgtaagtgcgttttaaagcctcttcaggacttgtatccttctcaccctcaatacagtctaaccaaatcttaaacactaaattttacctctgggctctttcttcttctatcaaattattcatctcacaatataattgtttatataatttataatacgaataactaagttgtagtagaataactaagtgataagagtataactaagttgtaatagtataactagatgtgtgtaaataatactttagatggccaaggaatcacgtatccagacttcttagaaacccttactaaatcaatgataatcagtaataatattacgtggcttattatcatgagagtaccggatagaaactctagttcctacactaaaaaaattaaatagttgaaaggtactttaaaagttggtctacaagttgaacatttgagtagtggattttcttctcaatctggacaatttgggagtcaacaagtaattttctctaaaaaaatattaaaaattataaaaattgataccatattgcagccctttacctttacttggtttcgaagtcggtcacacattaaaacctcaccaactttacccttatcctttccactgattacggttacctaaaatcgatttatagtatttaacatctaaataatgataatttacagtgtttaacagtgaatgaaggaacaattagttaaaattaccttatctccaggacgaatcttccaaaagtgaataacatccttcggcttcacaattttaggacctcgagactgaaaataattaaacaagttccttttaatatcatttgaatttggtaaattgttgtttagattggaaggatagttaggtgaagattcggaaaaggtagttgcacatgagttaagaatcccatggtttctagcactattgttacataaaacactgaaattgcatagttttaacgttaaaaaattataactttgtgaaactttgcgataagctccaaatttcaggagattctcaaacattacaacaacacatgggtatattacatgagtaaacaatatacaatttgaaaataaaataaatatcaaataattaatgaataaatacaattaattattggaattttaaatttttaataaaactaaaaataatattataatttagagaatttaatcggggaaagaatgcagtttgacttgcttgacggagtctttattaactttaaaagtaggtttattggaccgtccaaacttaaatctaggtaatctgaaccttcttttgactccaggatcctggttgggtgggagatcaaaaggagaatctgaccttcgtctggagtctaaaacactactctgagagtgttttctgccagatttaatctcgccgccagtttcggaatccacatctcctggttcttgctgattattcaataatctatcacgacatttacctataatacagtattaggtgtgttaactatattaacactaaatatatattaattttaactattataatattaactatatagtcagtataaggataatggatacgatttcttcttttatccttagttttacgaataactttcgaaatataagtttttgatttattataacatcttttaataccgacaccgacgaatttgaaaaaaatcttaattttagccaggaaaatataacggcgtttaggaagcaagcttctgttagtgtacgtaacagaagtaagatgttggtcggggaaaccatgttcaaagtgccttacgtccttccgataagtgaaagcgtcatcttcgtggacactgcctgaatcatcttctgaatttgagcctgagacaaaggggtcaaaatctatttttctgtccagtcctggatgaccaagtttattatgggctttttgttccgattttcttctgtaagcagttggggaatcttcaaggctccctctataaccagttgaagcattattatatttagaataattatttggattatcatatttgtggtaattattttcatgttttccagttcctttcccataactatttgaagaagtctgagaatggtcataactatgtcgactattatatttttcattcgagttagcataattatgatgcataaatgagtttgagtttggtttcttaactcttttagcagtttcacttctagtaattacaaactcgaaatcatcgtcatgttcggggtctctggaccttggaatcagtgagcctgatctcctacggtcactgttagaattgcttgcattccagaggttttttttaggattgaaaactgaattttcgtcatagtgacggttttcttcaaaatcaccaaaatcagacgaccctgactgcaactcaatcttcatgttttcaatagagtccaaaccatacttaaaaaatatttatcagtaattggcagtatttcaagttagtatagtatggaatttgggataattttttgaagatttgtggagaaactaaaaatacaaaattaattcatatcaacgtggtccatatcttctattttacaattaaaaataaattaataaaataaaaatgaattaataaaaataaaaaggataataaaaagagtgtaacgaaagccagtacttggtatatgaggcttccaagtagcaagttaattataatttaatttgttttaacatggcttcgtaattttaattttaatttaatttctgtgtcaaattgacacaaataaacacatttttgtaattttaatgtttaccgccaatgtgccatttaaattaaattaataatatttctaaattaaatttataatacttcttaattttaaccttttaatgttgaagataattttaaaatattttgtcattatttcacagtaatataagcttatttttcctcgaccccgatttcaattttaaattcctttaaacttattttaaagatgttgatgaacagtcagaaattacttgatatgtctgataacaagtttgaggaactcataacactcatcagatactcagctttaaacgcctctgaactttcctctaatgttgccgtctcgtttttatcaaatatgctcaaagattccaaaatatacgtaacatcattgctactaataccattatatatacttaatactaataatttactcagggtcctccaaattatgaagtaacaaatgaggaggagaggaggtttattgagttctatgaggaggagaaaccgctggaagttgagtcagactcgagttcagattcccgtaaaaacaggagatttaacagagtttcctcgattaagaatcgactaaacaggattatttgtttgtttagattaaataggaagagttcaagaattgactcgaaggctaatttggagcctgaagtgggttctaagaaggagaaattttacatttcatatgctgacttaatggttcccagcaacgttgaatatgatcctaaacgactggatattcccatttatgactttagaaggaatagcttatcttcctctgattctattgagattaaaatcgcccctaatgacaactcttttgaggttcctgaacagaaactacatccaatactctttgaatctaatactctattccgtcaaaaacacccttggctacatcctacactctcattcactaaactctggtattcccaccccttactatattactgtacttagtatacttccactaacacaccaccattattaccactataataatactttgctaattatattatagtaaaataaagtataatgtgatgtcattaccgaatttgatccatcatgtggacccatcaacatcggcaatagcatggacgctaatcgaaaggtatttccacactgatacttaccgctttcacatctacattgattgttagacttgttttgaatggggtgttaacgaagtttaacaggaagttgttctcatccgtgtgttatattctggcgtacaagtttaaccaggacttcgagtatgaggtgatcaatgagattctcacaatttttacgcgtgaaaagaacgtcgacgccaagtcgattttctacaatgaaatgaaggtaatatatacagttaaggctgtgtacagtcattgtattcacagtattatttatatagttagcactctgcgtagttatggttgagttgatattgctttttagatttttgcacttttggaattttcactgaaactcaagtatacgtatattcaaacgcatattaaccattatttggacttcaacgttagtttttaaaattttaagttctttagaaaatttccttcttcgaactctatgacactcccgagtccacctatacaatgcttgagctcgactaacactctattatcttaatttttgtctatttaccataatctatgtatataacactgagtatcagtatattacagtatgttacaaaacatttctatggttacaaagtctatacacaattacaaaatgtgttgacaattacaaataattccatacaatttacaatgcggttgaagttttatcgttacaatttacaatacaggtgaagttttagagttacaaaacactatacattttttatacggttggtgtttaagtttacaaatagttccacaaaaaactctacagtccagactctatacagatgagattacggtctgggctgattgagaaaggtggaatcagtgaatctatgactattgtacagtttaatccagggatgctgaagtagttgtgaagcgtcaggtctaagatgcgactgcttaatgaagcacttgtcgagaaagtctcgaaactcacgcgacatctcgttcaagtaaaggtttttatactttttttgccaaaactcataccactcaagggtttgaatacggtccaaaacagtatctaaccgttcttcagtagttgatccaaagggtgaaagaccaaaaaaaagttcaaacgctagtacaccaatagtccaaatatctgttttcggtccgaattctccaaatctctttgaactattgtatttatacgtacattgctctggtgaccagtaatcatacgtccctcttaaaaaattcaaatttccattcaacttttcacttccttcattcattccaacaactgggtcgtgcgtattattgattccgttggtagtatttaacccatgagaattaattccattagaactgtcatctccgttagaattatttaatccatttgaggggttggaaaagttgatatgggcggatagtccgaaatcagcgagtttaacgacgttgttttggtctagaaggatattttcaggcttaatatcgagatgagcaatgtgcttatcatgacacgttctgagagcccagatgacttggaacataatctcacacacttccttttcgggtatgcgcttcttcctcattaagtaactgaaaaggtctccattgtggcagtactcaatcaccataaaaatcatggtctttgtggtgaaccaagtatacagactataaaattgataaatttgaaggaacgaaccatgaaatgtttggatgtcttaagtgagaatgtagttctatttcacgcttaaacatcgattcctgaccagttctaaagaatataatataaaatatgccaattatacacaacatgccaattatattataataattgagtaatttatgaattagaattggatgtgtttgtaataataattaatgtgtgtattcgaatacccgacgagttgtgcttttgaaatacattttaaaacgcagataaaaccagttctgcgttcccttgctaaaaatactctaccatgcgctccatcaccctaaaataccatcaataataaatcgatagtataacaataataacacaataataatactaaatggcaattgtgattaattttatattgatgtgataaggaattaccagaacaccgccgatgtcaaagtcgtctagtgtgaaccagagtgaatgagagctactttttgatgctatgtccgttgcagacgccgtaagtcgagtacaactgcaatcatagccattcaacattatatgttacagaatttaatattatatgttacagaatttaatattatatgttacaccctttaaaattatttgacattatttacacaatttagtaatagttggcattatttagtgaaatttgaaaatattttaaaattttaacaaaacttaacagaataaattaaaataaaataataaaatggtaaaaataaaaataacgtcaactgtatagggcgagatgtgtattaaaattagtgtgaaaaatagtatcattatgttaaaattttatatttttcacattaaattttaaaatggcttataattgtcctaatgtctacttatttccctaagtcgttgaaaaataaagccaagagcacatttttgttatccagaacttcagtttttccacctagtagaagacctgaaagatggctttacgactctctcaaaacgcacccgagtttgaacaggggctaccctgtttttgataccatatttgacacacttaaccagaaggcaagtggtttaaggcgttataggcctaaggaggagaagattccagttaaaaaggactatgacttgactgatcaacatgagatgaaccacaggttcagatttgagctcaatggcgttttcaacggtattgctataactttttaatttttttagaaaagaagtttgaaactgagttgcagtcttactgtaatcaattgtttctagttggttggatcaagtgcaggaaaaactttgcaattggtcacgtgagtttcctttgctaatttcttagcttcagggtaatgttatcgcaactactcagatgaagcgctggatggatattaatggctctgacaacgctaaatttaaccgtgttttcttccacgatgagaattacgctattccaaaacttgattacaggtacaaactctaaatttcatacgttttagtcacctgactgttgttaaggactataggaaacccttaaaaaagatgcagcacgagcgtaatcttgcgctcaagaaactctcaattctctcatccttataatattctctaatgtgtgtactatccttaatatactttattacgtataatagtgtgtgtttaataaattgagtgaattatctgcacaatcttgatgtgattcttaaaatgtgttttcgagcgaagttacaatatagttctgctattaccaaagctgatatgagtgttgttatcacgaccttagcaacaaacgatgtttcacaaatcctacaatcatccataagattatactgtataatagtactaataatactaataatgttaatagtaccaaatagctactatttgtaatagtaaataattactaattgtaataccctttatctggatttaatcgtttcatgagccatatactacagattggatttaggcatacattgagtgcaggctcataaatctgatctccaacgcactgcggcacctctgcacactttgaaaacgagccgaccaactggttcttgctaataaatccaactctgtacccgtccgtgtccaccacaacattcaacgattccaatactaaaattaaattatgatatacactaatggtataataatatataaaactagtataattaagtataataatggacaaaatggaaataaactagatgaagaaacctttgtagccgaatttaatggttggatttaaggtataagcgggtcgttcattggtttcatcaggtattacgagtatagttttacttgttccatcgtcgtatagaagattttcaagtggtattgtgattggaggattttggaccttttcaaaattcaaataataagactcgctgagcttaaactcaatgattgggaatagtcgattcccatcagttagtttacacaatcgaggactcaagccctcattaaaacatgatttatccacgggtaaatatgtcatcatcgtcatccaaaagttctttggtaacaccaaatacggtgttctacaacatgaattacacttaattcaggttaaattagtgttatttagctatattatactgtaatttaaacataaccaagatgtgatataacatacgtaagatcaatgacggcttcccaattggaagaggtccggccaaatagacaagtgttacacattttaagatcatatatggtgaattgtatgagtgaattagtgaatatcccgccagtttggcgcttttcagaccaaattatgtcctcctcaggaaccctgtcagtacccagaaatagcttgctaggaaatctaatattttgaacggggttaatatccaatacaaaaaagccgcgataatcacgtattaccatctcccaaggattacttctacaacacatatcagaacctaaagcaggtgataacaacagagtaaaaaatacctgatatgccgagaataccgtcaacgttggtgaaaatcttgcgatcataacggtctaaagagcgagcaagcttaactggtactttatcaaatgaatatggagcctttttacggtcaactgcgatttttatagactcaaaaccctcgattgaatatatcttaaaaatgtcagaattgattctcacaattgtggccctaaacattgttaataagtagacaactcacgtcaattcccttatttgagttggagaattggtctctttacattggaagttgaatctgccaggaacacaaattgctgtattactacaccaacttgctgtttttgatttataagggtcgtaacaagttcctttatcatctttaaaacagattctgttggtgttttcaaataaaattataccgcaaacgtttgaatttattaaaaggttcagcagctgaccgccaacttcaactttagcaacgtaaccagtgccagggacaaattctaaaggtatagaatcaacgttatagtccacaatatttggctctgagaccaaaatctcctcagagcgcacaattaaaaatatccgacaaaataacaaagaatataaagtcaaaattagacttaagtttattaccattccactctaacaccaaccatatactttactaattattttacaaaatatacatgaaattcattttgattaactatgtatagggttaatattaactcataatttcaaaatataattatacatttcatatttttccattaatatttgtcataattgaaattttattattttaaacaaatttacctctaatttcacttacacatagttaatttaacacacagtcaactgctgttgtgtattattaactatatgctacttccatatactatacactaatattaaatgtatatacaaaaatataattaatcttgtctaaattttgggagtaaaaatttccggaaattttggtaattttgggtttggattccagaatcccaactctgattttagtaacaattttttgaaatttttcaaaagaaattttaatatttacctgttttaataatgcggattttaatgaaacagtttcggtctcaaaatttttagatttagtccgatgtccgtctcgtgtacttctatgtacttatttattgaattcacgtacttagttagtaacagactatatgaacatttgcattttagacttaatttttaaatattatctcgcagcgtattaatactttatatcatactttacttcttgatattaggtggattttttaatatttaaggtttaattatttaataacacctaatactattattttaaccaaaaatcccagtataagttaaagattaacatattagttaagagttagtgtcaaatgggttcaaattctcccactgaagatctccaattcggggtccaagatgaggctcaaaatggcctcggcgacgttgatattgatcgtgtttcagactccaaaaatgatgtagagtctggcttgtcatctgatgtctattcaagatcatcgagtgattttatagagctcgacgataaggttattattgaggaaggtgaagagttgttgaaggagtgtcccagttgttataagccatatggaaagtttattgccaatgtcaaggcctcagactgtctattattcttgttcgttgtttcttggatgccctttattgctcgttttacctttaaaaccagctacgttaacttcgttgagagtgctccatctctgagatccacagttggtaacaagttagtattcttcgcgggtttcttttccgggaatatgctaataatttctgacgttattgagcttgttttcaaggttgttgagtactttaaaaggggaaaaactgagaaattaaagcttagtttagaggattccgatggagaattaacttatgaaactggggagacaaatgataatttaccaggttggaagagcaagaataatattatagcagaaaatagaccaagttctcttcgtaaatggttatgttgcactacttttgtcgagaagtttttgcatgttttgtacaatataagatggcttgtgtctggatacctctttattataacattcgttgcaacatcgttaatttccatgttttctgcacaatcagtcaatgatagcaatttctacttgcacttaatgcacctgataaacggattgtcgattcctttgtactttatcctcggaatcaagatggtgggcatgctcttcgttgttgatgcacaaaatacactattcaagatgaataagaagtataacgatccaataagaatgaccaggactggaaaaaccgttatttcttatcccgtcttcgcgttcttaaccgacaaatgtccatgcaactacgctgttaaaaagggctcaagcttccctaagaactataggtactcacttaggtaccatgccatggttacttgcggatataaacttgtttatctcggaattatcatgtcacatgctatgtatattatcgggattacaattttctcacttgctaccaaaatcaaccttagaacttaccgttaatcttaatctcataaatttttactatacacatttatacggctatactattatataatacataatatactttactattattaatagatactatactttacaacattatatatcatatcatatgatacatagtatatataataagggtgtgattatgtcagatattcaggaggaaactcctttcttaaagtattagtttcatagagttccttaatgatatcatgaccaccaatcagatttccctgaaataaacttaaaaatatgtaaataaattacattaacatagagttggggatatgtaggccagttcgagtatgttttcagctcttcccttaagttaggatcatcgaagatattataaccctcaaacctaactcctgagctgtttaacatgttcaccactgctctactgaaacgacagaagggctcagccttatcacccttcataaacaacaatacaggatgttctcgcaacaatcgtttaatcttatccaaagtggtttcccgggtcttaaaagcccagcctctgacaaaattgaccagaactgaagtgacacaaccctcgagggagttcaccaacgaggaattctaagcgggttttttaaaaaatagaatgcgtacctcgaaaaataaaactgttggaaggcattttacatcgtataaatttccaagtagctcaggactaacacatttaaacgtaacgtcactaaaatcctaaaaattgttaaatgttaataaaatcctagaatacactaaataaaaatagaaacctttgccaaattttcggcaacgtccattaaatgcttactggaaggttcatcatcttccaaaaccagcaaaactatttttccggtgattgatttaactaaattttcaacttcttccttactacttaaattcatttttaccgataaaaaaatattgttttcgaaaatttctaaaattttactctatagtgtcaagaatctgggcttactgttttatgtgatattatttttatttttttattttgcaaattatgaagttttctaatgagttttattaattttccagttaaaaaaattaattttttaagatttcaaaacagattcacgtcaacggttggattctttgaccgtttttcccagaactggtgggatatcgacggtgatatgtcaattttgcatgactacaaccaggttcgaatcccattcatagcaaattcttacataaaccgtaaaaaggataaacttgaaactgattttgacccccctgataacagttcgaatccgtttttatttactcaatttggtattttcaaagagccttacaaaaggtctagtgttcacatagaatcagtacttaagggtcttaaaattttagatgttggttgcggaggcggaattttaactgaatctctagctaaatttggctctaaagtacttggaattgaccctaacgagaatcttataaaagttgctaaatcgcataaaaaaacacattttgataactatcatctcagcttagggcttaaaaacgattattctaacaatcttgactataagtccacttcagtttatgactttttaactgacaagaccagggccacttttgacattgttgtagcttcagaggtcatagaacacattgataaccgagaaaaggaacaatttttcgaaactttaacgtcctttgttaagcctggaggcttatttgtaattaccaccccaggctccagtctttcctcctattttgtgaatgtatttttagctgagaacttgttctctaaagttcccaagcacactcacgattttgacctgtttatctcacccagaaactgttgtagaatattaaagaaacttaattttgaacctgtttcaatccaagggcttttatatttaccatttctaagacgttttttccatataaactcacctgacttactctacatgtactccttcaccacttctgatacagaataacttacagtcagtattataagggaataatggagttaagaggattcgttcgtaaatttaaacctgaagaaacctttaatcctctcaaggattctaaacttctgggccacccggtaattatctaatttacccttaaatagatatatattagcttaaattgagttattttactgttattttacctaccaaatcacaccataataatattatcgattaggtctatcctgtgaatttaaatgttgatgatccaaaatgcgaaatttgtaatttgaatatgtcatttttaatgcagttgtcggctcccactactgccaatagaaaccgtgtattatatattttctactgtttaaatgacgccactaaggataaaggctggaaattgttaaggtatagcgctgaaaaaccatcaactactgaacctaagttcggcgaaatgagtgatttgtcctggtcccttgactcaattaacttaaacaccacaggtacctaaccctcattcataattgtatttaatatttaaatgttctgtagaaacggatggattacgtgtgattttggaaaatgatttagtttatcattctggaaattccgataaacactctgtttcagacgagcatttacactctatagtactactagagaagtttaggaataagagtaaagatgaaatagacgaagaggatcttgtagattttgaatcactggcaaatgcaaatcaacctccagactcagatgatgattcttcaatcgatgatgacagtgatgatgactcagaagttgatgcaattaatcactttcaaaactacttagcatctagacctaaaactgtatcccatcgaacctcacactacttatcatatagttacatgcaatagcattagtagtatatctagttatatagtattataatattattgtgagtattttttaaaagattttaggtggttagggttaataggggtggcaatccaattagttttcttactgatttaaaccttgatttaagctctaaagtttgtaaattatgtaattctcaacttcattttgaagttcaaattcttccgcactctattcactatatgactaatgatgacactagtggtgatagtgttactacaaaactaaagaatatttcattgagattgggtggtgtattattttatacttgtaagttcccagcttttattaatcttttaggcagttcagactgtaatactagcacaaatttatctcaagaactttctcacgtcttactatacaattaatctatcatcatatactatatgttatatactattaatactatatattatatactatatatactatatattatgtgaatatagtatgcgttgtatacattatcattgtacactattatacaaatagagtagtatattaaaaggtgaaatcagatcgtacatacatggcccacggaaatttcatgcgcaaactcttgttaaaaactttttctatgggaatttcatacttcttacaaaacgcaacggtgattctaggatccatataattaattttactggttcccaaagctacagtcttattactatccttaattgtcatcttaatggcgtgatccttttgcttcttcctacaaattttaagggtaatttattattacttgaggggtgcaaaacataaataactgtcctggagtcaagattaactgagtaagtaggttagagttggagataataattacttgagagttgaaagtttgtttttagcagcttctaacttcatcccgggctttgtaattagttttctagggtttccattcacgtcctaaaactcagattttaatgtaaaattaccttagttttagactcaaatttaaattctcctttcgaatttgactgcaaatgcttgcaatactcgtttaattcctgtatatcttccttaagcattttggcctgcaacttcagcttagtcattgaagtttcatgctgtttaggtatacttctttgatgattacacagtattgcaacttctcgattcgcataattataaaactgtagtaactctgaaacatttccaatatcaacacacacgtccttcacatcatcatcttttttatgtttaacggtgtcagcattgtttgagttatcggcatcactattattcggatcatccagatcatcgatgttgttaatatctatgctatttgtggtagttaagcttgaataatcagtgttagaagaggatcttgaagttgtacccgcctcacgaaaaaccttggtatcattcagacccttaacatcgtttaatccgtcagagagcgtatcggtaatggagcttgggagtagcgaataagtggtaatgcttcttttatatttcgatctgagtcttttaaactgattctgaagtgtgattgaggcattgtaggtcctgaaaaccttggctgataacccatccattagctctctcaaatattcattcaacttattagtctaaaaatgtttttagtaaaattactccgataactaatataattattttaataaccaatttaattattagctaattattaatttaattagtaaattgcgtttacgttgattttgttgaaaatttcttcacttgctttcttccggtgacaaaacttcgccagattatcatacgccacgtcgttcagctaatacaagtcattaaaacaccatttaatcatgaataatattaaaatagtataaatagtattaaaataatattataaataatagtaatactactaatggtaatagtataatggtaatagtataatggtgggataggtaaggatagtgatacagttactgtgttaaaataacgtatggagtcttttccgaggaagtcgagagtgattgtattttgtttcttctcactgaatttgatgtgttcaactcttaaactacaacagccaacagtgtcagcttcatctgcatccttttcgcctccaaccctcagtgccaagaaatcaatcaaatataccgctgtccccaactgcttctcataaatgtccatggctacaattatatcaatatatagttaatcgtatggtaatattagtatatagtatatacttagatatatatatatatatagccagtgttagtacagtagtattagtataataataggtataacactaaaagtaaataggatacagagcattttggtattgtagtcatctctaattttctgtatgtaggctttaagctccctggctttattatactttaaaaaatcatgaaaccctttaaattttgattgtgcagacagatacatgtacttaaactggtcattaatactatccttgtaatatgcaagccaagtgacactattgtcatggtaaatatctttccaagagtgtccttcacgttgaaagtttgatactttaggaactggtgcgtcttttgagaggtttaaaataacatcttttggaaacattcgggcttttaaaagaccctgtttaggatgtagccccctacccttgaataatcccggaggctcaagcttgttactactaaccttttccctaacccaatcaactaaggcatagttaaacctatactctcgtttagcatcttcttgttgcttggccttgtaaaattctttattatcctttttcttctgtttctcatcctcaagatgggttttaattaggctgaaatccacatcagtgagtttacaacggcgtataaaatggtccttttcaaatttagagacgaaaacttgccagaaattcttgcagtagatgtcacttgtttcgtagttagttccaatactctgagcccacatggtggcaatttcttccaaatgaggcggcaagtgtatcgtttcacccttcacctttatcggtacgttgtgaggaacgtattctggtgtaaatatcatcccattgtgttccaagtacttccaacgacttgacttactctcaaattccaagcccttattataatccatatctccatctatctcttcccaccaacggtttatcggctctaatgtatcctccaacaccaatgtatcctctttcttctctttcttcacttgtaccttttcttccatcttaacattattcacaatatcaactttcacttctctttttacttttaccttatttttgttttcaccatcagtttcatgagttttaaaactagttttactatcatcactagttttggcagtttcctgatcaattttgggtttcattttattcttagaggtttgagcttcaactttaacactatcttcagcagttttggtagatttagagtgatttggagtatcagaattgagattttcagtagagggaacatgttttgaatctgaaatattagaattatcaagaggtttatgggagagtgatgagtctttcatagagtcagtaagagtttccaacttgtttgagagtggaatttcatcagagtttgaccttttaaagtcagacaaatcatcggctttctgaactttatggtcatctacgccaccagttttccgccttttatggctatctgtatcatgtttaccaacaggttcatttaggggtaaattattaactttagaatcaggcaacaatttatcatatttaacatctgatgcgttatttacatgttcaggtttagtgagttcactggaggaggtaacaggttgtaaatgtgtttggggagagagttctgatttgggagtaaaactttcttcatcactatcatcaaataaatcatttatagtgcgttttttgttaattctaacacttaaagtaaaatcttcagaattatcctgggctacagaatggttcacacaatggttattgagatcattcttttcaggataaggtctattggaatttgaagtattaattttattttggtttggaacgtcagttttggccccttttaagggttctttagcattctcaggctctgatttggaggattggatcttcggcacaggaacctaaataaaaaattaaacgtgaagattaggcttatttacccataattgagagtccataattatttttaacttaaataatgtacaaaacagtataaaacaattataatttgaagtttgtgagttttattgtgcctaacctcagaattgggataaaccgaataaaaagttcagattaaatgttttaattattttttgaatatggaatcgcaaaaggattggattaaatactgttcagatcacgtaagttttatttttatttcattaatttttgaaataaagtttattttatcctggcttaatctatgccattttattataaaatttctttaccgttttttatgaattttattccaaattttaaattaaaatttttataattttttttagattttgagaaaaatgagatctgatcggtatggtaatctgtttgcgacccctgtattggaagcaagcgattctataattcccccttcagtcaaggataattataggattgttattagaaaacctatggactataaaacagtcaaggtattggtttatttaattatcctattcattcaatttaattgtattcttagtttagcttaattatacattttaccagattaatgcaatattactattaactatcagaattagcctatcattggtctaataatgttttagatgaagctagattctggctcttatatgaatccagacgagttctgcgaggatatgaaattgatttatgacaactgtatgaggtttaatccaccaattggaaacagtaaatgggcacatgatgcagccgttacaaaccttaaaaagttcatgaaaatgtaagcaaacctattttatacactagaataactattttacacattttaataaatatttgtaaattagattaaataattttataaatctgaataataattttaggtgggaaacgtcatataaggtgatacagaatttgtatgaaaggactaaaaattccatggttaccaagactgaaccaatatccacagttgttatgaacaatttcgcaagtgttaattcaaattacctgaatgcaagtgatataaataaatcccgaatgacagaggggtacgatagaccgtacccagccactgacccatatagtaaatcactttcagccgatggttatactagacctttttcatccactgacggcgtcaattcctaccctagtatgggttcagaccccgcagttgatctctcgtgcacgttcagtaacagtgaagttacaccaagaaataagtggtcgttcagactaagcctccagagcatccaggagtataaactccggaagggttttgttaaccaagtgcctgaatccaacggattttcaagttatctagaccctaaaatcacccgtgaacacgacattacacgcaatactaatccacagatggcattgtcatatgatggatacccgactgttggaactgccctggaaacttcaaattatgaagtctacaacgagtctggactctcaacatacgccggtgcagtggactacgaagactttgaaggtgaaactcacgcgagtttcgagtacgaagtgccgcaaatcctctctaaaaatgatgacgggattgtatgtgtcagcttcctctccgataacgattgtaatactctgttccccgattggaatgttataggtttcaccccagaaaaaacctactcatccaacgcttattcaactaataatagatatatcagtggaaataacgcctataacactgctagtaatggatataacactggaaatagcccgtttgccactaataacgttagatataacaatggagctaacgcctataactccggcagtaacagatatagttcgaacaacagtagatacaccatgagtgatgtgaacattcgatatgtttacaaccagttgtatttgaatgatattaacagtttaaagtttgatcataagcagataatccaggaaaaagagccagttgaggaggagtataaactagacctgaaccatccgaaaattaagtttagtttaaataattcgtcagaaatggtaacaacgaatccagggtcaccggatacatctttttacaatttggaaactgatgaaataactgacaatttacataacaatcatcatggtaggaagggatttaggaaatttgtggacaatttgtttgtaaaaaagaataactcccacgttaagagggaacactataacggacacacttcagatttaactaataacaatttgattaacaagtttttcaatgcagattcaattgatttaaacaacacgtattatttaagcccaaattcaataaatttaacctccaacaccgatttcacaccctccaatggagatttcacccgttctaatggagatttcacacattccaatggaaattacacagactccaacggagactacactaattcccactgcgattacgcaggttttaaccaagatttaaattataactcagatttaacctataacaaggacgttaattacaacggagattacatcacctccgataaagattacttaacatcgagcagagatatagactctaatttggactatttgtattgcaatgatttggagtataatgtgctgggattgaggcctaaagaggaaacgctggatttatatatagacatagactcgaactccatagtaaacgcatcggaaacggcactgttgttggaaaagaactttttcagcagagtttctgtgaaggaccagtactttaagatttatgagaagccccagctgtcactgatttgtagtaataagggttactttaaactcgacgagtctgactttgtttacgaagatgtcgacatgaaacacattcgtatattcttcttcaactgttccaaaagtaaggttaaggtttcctctagaaaattgagtttcacagacctggttttgggcgaccgttacaacttgtcccttgtaaacaacttgcacaacgattttaagctcgggaatgtgtcaaatttgccttttttcacccttccaaactctacgcctatttgcttctcaaagcagcaggacattctctacagacttcaactcatcaacaactccctgccagtgcagctactcgcattacacattatatcaactcattaatctccaaaacactctaatataataatccacaatagtatttgttattatattattgtgtacagtattatagtatattattgtgtacagtattatagtatattattgtgtacagtgtgttatagatattgtggtagtacagtacaagtagtatataaaatacatagtagtaaatacatagcattagtatacatatatgtttatagggtaacaatatcatcgaatatatgtgtatgtagtataaactaaaagtagcaaatatgtatcactaatacccgtgagtataggatataaaatgtacatgatattatttaagatggttcgtgatggattgtatgaacctagtagaataaaagaccgggttgacacatgaaacgccgtgatgttgccgagtttgaaagaaacgccatacgtgctcaagtctcttggcgaggttccaagtggtgagaacatcaacgatgccaacatagtacacactggttttattatcagacatgagcgtgtgggggttcccagggtcaagtttctcagcttcgtcccagttaacgttatccttggactgggctctgtagtgaatgcccaacagcagtgagtagtcgagaatgtttgaatccctcagaaagttaacgtcatttcgcaaaacctgtaaaaatgattctgacatctcgcccaagtgaatctgttctccaagcttattgaactcgatgtccttaagtgctacagtgtggtccttaagttctgaaggttctagtcttcgacccacccaactgccctttaaatcgtacctcctgtgaatgctaaccctggagtaaaacacgttgttcatgacaataaagtaaaccttctcgcgccggcttctgttctcaatactaaatagtccacaaaaacgcgtcaaaattgaatctggactcttttccagatgttcaaagtaacacttcagccaccgtttaacgaacttagcgcaacgtttagttatggttttcaggatcagacggccgttaattgtatagtaaaacaaagcgccgctcttaccttccgagaccaattctgacattgtgctcaggttccccagcaccatgttccccactatctgttctggactcactgactccatgtagtccttctcactcaggcctgaaattcttctaatctgtcgaaacaccatgggtgcgtattctttaaacactattctgcgagttacattttccatattattgctgctgattaaagcgttattacccgtcagagagttatctccattctctactacattattggtattagtatggtgttagtacttaatattggtatagatataacaatagtgatataaaatattatataaactatggtattagtatatggtataaatagttccaactatctaactatattcatgtagtgttaccgttgtcattgataatgtaatcactgttgaacctggaagatgataagccagtgttggtaataaacttggtaacattaagtccatgtgagttttcattaatatggaagcacagtttaacattatagtcatcatctgagagcacagcgttaacctgagcgtaaacgtgtcgcgcagaaattgaaaggccaatcatcatgttcagaacgtgattccagctctcgtggccgaaatgaacacttagtccgcgcttagaagagccgtggtcaatgcatttgtatacgtttttcctattcacgtgtgtgcggttgatgtaactcctggtcgtggtgttaatcttcttgaggaaggtgttgacacctttgtaagttgtggtcacagtttccatggcgtactgcgataatgaaatccctaaaagctctaggaattcactgctctcataaactgcgtttatatagtcactttgagagaggcgtctagtcccatcgcgtgatactgacgcgaacttttcaaatactcttctaacttcatctgttgggaaatactttggctcacgacacactaacagtgaacgcgttaattctatatctctcactacttctacaaattctccaaactctattccatcctcttccagctgagccatttctttaactgcttcaggcttagcctcattcaaattagtcttgattccgctaatacttgacgtaattccgctaatgctcgttttaattccgcttatattggaagttattccgcttaaattagatttaatttcatttaaatttgaagtcagcattctggtggtgtttataatgctctgtctggtagctcggattaaacttcttgataacgattcttcagactctgatttacctgaattatccttagagtcactggaatgattttcaggttgactggaaagattctctaatttatcagagttatgggacttaaccaggttatccctaaactcatcagacttatccttagaattaaccaaatcatccttagaataattagactcatcaggtttatcaggcttagattccttcgaagtatcatcgaatttgtcagaattatcactagattttttacccaagttatcctcgaatttaacggaattgtccttagatttaccaacgtagttattaaactctgtggaattaggtaagaaggatttagaaggggttctgctgatgttaagagatcctgtgagactattaggcagattttctgggtttggatgtaggatacggtaacttaaggctagttttttagcttcactgcctcgggtcataatcagaagagatgaggagaactcaacgaaatcaaggcagtcatcattgttcagatcaaaggctctgaacattcgttcacctaaaacatggcccaacgttccgaaaagtcccaaacactcctggaaactatgcaaagtcaactttccattcggtgctaaagcacggaacctgcatcagcattaatctaatagtattaatctaaagtactaatatatagctaaattaaccaaattaacactttcaatgtatattaactaaattaacactttttaatgtatattaactaaattaacactttttaaagtgtaactaggggccaaatatggtagcaataaaggatagatagggttatattatggcaaaaaacaaacttgttgtatatagattgagcttcttcaagtgagcaatctatgatagagtttagattttggtagtaatcgtttggtattttggctaaaagccgatcacttctaactccgcaaaccgggaatctcatgttacttttactagtacattttacaaattatttaaaacagtttcgttaaaatttatttaaaatggtaaacaaactgataaagaatgttaaaacaagtcaattgaaaaatgataaacaaagtaattgaaaaataaacaaaatgattgaaaaatggtaaacaaatattttacaaaaattgaaaaaaggttttaaaaacagttgataaatgactcagactaaaaagtctgagtgttttaaaaatatgtattaggaattaggataaaattagtattatacaggggaattctggacatattttttatgagaagtataataagttattctgggtgaaataactcccttttcagacaacaaataacaagatcctgagtaatttattaaaaaaactaaaaatttaaaaaatttactaaacatcgctgcattaaaataataatctaatcataacgtcaccactacacagattcacttaaatagggcaattacaattatttattccccaaaaaacacataaaatttctccttaatattaatcatattatacataccttccaatttaagatatgacagcgatactaatataaaaagctgtaataacgtaaataatgttcgattttagattattttttatatttttatttaaattaaagatctttgcccaaaccgtcttattatattctgaaacgaaagtataatgtttggtaatgttaaaattgtcagaaaacagtctggactaagttgtttgagaagctataacatttcaattgcgagcattgtgctgaaaacgtttaatgtgttatttgagagtagagtgttgacgctattttcaatgtgttttttagcgtcaagttttcctacgtttgcgactaccaattcttcaggtttacatgtcatctcctgcttgatactctggttatatttttcacataaatctcttatttcacgcactaaatcattgttttccttctgcctctccacaaaatcctacagctccatcaacaccatacttgatactgtacaaataactatataatcttaactgtacactattactaatgtatatagtgttaggagatgtgagaacctgtaagtgtaaatccttggtccatctgttcttattaaagtttaagagcatttgactctcaagtggtgtctttttgcagtttattactatgctatagtagttccgattcaggccatgaaccagtgcaataatcgttggcttctgtaaatgaccaatattactagtagtctgccttggctcatgtcctaatcatttattaccattgctattagttatatattatagtaaaatgatataatatataatagattaataatacctagcataatgagatgtggagaaatgagtctgaaacaatcaataacgactttgcctttgacagattggataggatcaataacaactccaactgcacgaggatttaactgctcaaaactctgctgagtattcacatcagttcctacatcacattttcattgccaataaatatataaatagtatagtagtagttgtttgtgttgatggtacctgaaaaccagcatccaaagcccggatgtgagtgataccaaccaacaacgacttccggacgtcctgttctcttaagttggtctttcatttcagtttgatagactgggtcaacagcctcaacgctgacactgttacctaaaaggaatattcaggcggattaaatacctgactggggcattgagaaaacgtcaacgactctgatagtgtaatcgtcaataaaatcacccagcatcaaacccattacttccataggaactccagcctatatgatagtatattaggataaattacattagaattagcaataattcaagagaaattatggtataaataggatggaaataaggaatatttgaggaatgtttaaaaaataccctcccgtgttttagcattttaagtagagcaagagacgagatgtaaacttgttctgaagtgtcagccaagggcccaaaattttgcatatttcgcattcctccaaaggaattaaaaagtccctggaacgaccttgtagaatctcccatgctcaaaagtataaaattacaccaaatcttttgaaatcaattattgaatttagtttttaaaattaaactattaaattccttttaacaaaaaaattataccaaatacttataaaaaaaatttttatggaaaattttataaaaatatagaatctgataacaaaactatatgaaatgtgttatcaggtactgttggtgtaaaaaaatagtttaagttttattttaaaatatattagttttacgtttttaaatttaatgaaaattatattttcatcccaaacattgaaatataattcaattctccagtttaattttaaaaactcaatatttgggaaatctttagtaaaattttcaagaagtttctcaaattccaccaataacacttctgcaacacataaaaaccaatcagaagagttgactgagaagagtaatcggcttttggagatcactaattttacagagtcagaactgctacaaaacagtgacgtcgtagtttacaagcgtaatagagtttgcccgaagtgtagtaaggaggtcagaatttcagggcctgagctcgtggagaacgtctgcgctgacgcctggcgctattttcataacttttcttacactccaaactgtcctatttacggaattatgaaatttgtaaaatattccaaacttagaaccgagcaaaaggcgttattatcacattaacgaataaaactgtataaatggttttgttgaatagaccaggacaagtcagaggtttaacatgttccacatgtaaggattcatctacagtggtggttgaccacgttgaggggaaccagttgtgcctaagttgtggccgtgtgctggaaaacgtgttaatatcagaacaacaggaatggcgtaactttaatacagaatccctgggtcaggcaggagcagagaagagtagggtgggtgagttgaatgacgtgtggcttgacggtacaagcagtacaacatttatcggaggatctaaaaagatgcaacatttgcagaatttgatgacgaattatgactcctctgatcgagctctgaaaactagttttacgttgttacgaactatagcagattcacttaatataagggaccaagtggtggaacgagcgaaggaaattttaaaggagttgaaccaaatgggtcatttaagatcgagagcaaatagtttaaatactttggcagtgctgtatttggcctgtagagaaagttcagtttcccgttcactgagggaacttgtgatttatgatcgcagtttaactgttaaggaactcggtagagctattaataggcttaaaaaggtattaccaaatagaggaaacgcacccacggaagatgtttctcaacttatgccgcgattttgctcaagacttaacctcagtaatgagattatgacaacgtgtgaagcagttgctcagaaaagttttgtacttctgactagtgctcacagaacaacttcattagccggcggtattatttatcttgtaactcgtctttttttcgctgatgactcgccaatatcaatttctgacatttctcaagtttgtgggaccagcacaggaaccatcaagactacatataaggaactgtgtttatacctggataaactgatacctcctaaacataaagataaaatacataatattaccaacgttgctgctaatactactggaaaggtagagtcgagtccagctccagtaaggagcctactaacaggaaatttcaccaatttttaatctaattttttaccaatacatacatactgtatattgtacatgtgtatgtatattagtaagagaagtcaataaaatagtcgattacagattgagtattattttctaggtcttcttcattgttggagtcgactggtataactttgtagcggtcgaatacttcataagagtcaaaaaggcaagtttggaagatctcacattgtaggttttgtttaacctttgactcactgtagttacgggcttccagtctcctggctaaagtttcaatctcagttagaagaacgtaaacgcggtcaaattgttcgttttcgaagaattcaacactgtgaaactcgactagaaatccgccctttgaaaggttataagtgctcaattccttctctaaaagctcttcgtcatacactgaacagtccatctcatcgtcccattcattgaaaagcctcttctcctttatcaactttgcgatgtcaagatgggttacatgacgtgattccgagggatccgaactaaaaaactcatcaagcctcttcaaaacactctcacataacgtactcttcccacaaccaggagttcccaccaccaacacattaggaatcctcctaccttccattattatccaaattagtaacaatcatttgagtgtatatgttactttagttgtgtaaaaattttttagattttgtttttgaaccctttataatgtgtatcaataattttttacaaaattttagttttctaaaaatttaaaaacaagtataaatatttattaataaaataacaaaaaatacaataatattacaatgaaagaataataatacgatatttgtggtataatgtgtgagttgctgtatgttgggaataaatagtataagggcgaggcatttggagaacagtttatcccaatactttaggataaactcctctggccttgggatctctgcgtttctgaagttctacttcatggctaatagggtttcaacaggtaatagggcatggatttcacagcactttcgggaagtgatgcgctggaaactgttaattgagcatacaagttccaaaccactcacctggacttcagttatgaacacttatttactcagtgatcgatggcgcctgatgagtaataacaagaatttagctcctcacatcaggtgttcattccctgaagagcttttctcactaattgaggatgaatatggaccagaaaaggctgtgagaatttgcaatattctcaacgaggagccagtcactttccttagagtcaatacccttaaaatctcaagagacaaagcctataaatttttacttcacaagggtaccatttatatcaaattattcatttttgtacctttaatttcaccatattttataataatctatttccagttatagttaagtgttaaatgtgtttataggagtcccagttgagaagtgtgtgttttctaattctggtttatttgtgcaggataaacggaagttgttggagtgccctgaatataagtcaggaattgtggaaatacaagacgagtctagtcaaataataggccaaaacatcaacgtaccgaaactcactcattattaatattcttttagtgtgctgagggagatcatgtattggatttctgctgtggatctggcggtaaatcacttgttttcggtccaaaacttggtaatagaggtcgaatttaccttcacgatgtgaataataatctgctccaaaaggttcaactttactttctcaccttgatttaggccaaaaaaaggatgcacaaggcaggaatcaggaactattatatacttgatagaaatttagaaaaaatgaacaagttctacgggaaaatggactatgtaatctttatttatttttttacacattgataaattgaactataggttatcgttgatgttccctgttcgggaatcggtgcttgtaggactaatcctgaccggaaatggacttttaatagagaaaacgtatttattttatagttatttactcataaaattaatattttagtattattttactgagtaccacaaagtgttaactcgtgacaacagaaataactatatttataaaacttaatatttacacgtattttagcttaattcctagtaattttatatattaaagacaattgtgttaatttctaatgaattaatagttgaatggcttggtgatgaatcagaggatgatagtggaggagtctttgccatttttgaagaataatgggaaattggtgtacattacgtgcagtattttcaaggctgaaaatcagtctcaagttgattttttctcaaaaaagtataatttacaccctgaagaacagatacttcaacttccagagtccagaggcatgaacggatattatatggcaacactagttaattctgtaaattaaattttcacttttttaatttcttattttaaacatttttacacactgattccaatatttaaattatttcataaacatgttaaactttttaatgtgttaaattttattattaatgtgttattggtagatgattccacttgatgtcgagtattacgagccttcacggcctgaaaaacataaaatcaaaagcttaacgtttgtaaataattttttaaataataattaaaaataacttcataattattccattaattaagccaacaatttacacatttgggtacacattttaatcaggtttttgaggagggatttttcaaaatctgaccttaacacatgttatatggcagttttctcagctttcatagcagaccttatttgcctttacataccactgatccaatacacagatctttcaatagtattttttgatactttatcccataattatttccctaaaattaattatgtaattaaataaattattagtttgatgggtttttattatttgttgaaaagcaaaaggggagaatttcggttttttactgctgtaacctcgtttatttgctcgtgttgtacactggaattctcacttcctttttctggaaaaactcaatggtaattatacaaatagtatacatagtatattttgaaatatgggtgacgattgggtaggtttgggatattttagggaactgggcacttgtgggagtttttcttactgtgctatggcttccattcaataggtatttcggaaaattccataaaataatttcaggaaatattttatcctaaatatcgcaacttcactcataaattgtagattttagtgcagataatttgtttcagtaatttgcctcaaaatcaggtcggattctaagttttctaatgctcaagtcgatcaaactaattgaaaaaataaaccttcactaatcatttcaccaattttaactaattgttttttataatggacctgatttattataattattgcaatatttgttccccattgggtatggaatttttttcttaatttaatttttcactttcattaatttattcacattatgacagagattaacttttgccctgaatggttcctgctatatatattagttatctacttaatataattatataacataatgaataattctttagtaataacattttatatgcaaaggctgatattcttaagaggcagttgaggtacttttgcaggcaatgtgacttttcgaggatttcagactccaaaagctctgaagataactgtatttatcgcaccgactacaatatagccggaaagtttctactttagctcaactacatacaatactatacttaaaatactacaataatacgtatttgtgtgttgataaaatattaaccgcgttatgtttagagagaatatatttgtatcaccaatggttgttaaggatccgacattgggtaggactacacgttggaggtgtttaaagtgtggtcaccagaaggctgttttcttccagcttcctgagcgagtcaccgatgatgcgatgatgctcgtgtttgtatgctgtaaccctggctgtggatactactcgaaccagctccatgacgacgggaaggttgaactggccaatgagtttagtaatttcgataagagcaagttccaattcattgaacaggacatggaaaaatacaccagaggctttgatgaagttaatccaaatgatatggaatccattttataaagttttatcttcatttcatctttaattcagcttaatttggctgtaatttagtatcattttacatttagtttaccgtattttcgtactgtattaacaatgcaataattagtccggagggtacatttccaggagttgttgataagagtacctttcaggttcttttccaatttcttgatttacgcagttatggatatctgaagtccactttacaaggctttctcgagaatcagccctgggtggaaaacgtttataaatgtcaaccagactgtccctgcaaactgaacaggggtacatatcagcaaatgaatataaaaaggccaaagttttcaacttactatcctcatcctaatcaatattcaatatggctacataataataagtatatgtctatgaatatatatttggttacaggagttttagggtattttgaagctaaagtgtgtaggaaaagccaaccggcgttgccaagttcacctctatcaggaggatattgacggtttaacttaatggaaggatccctatcaaaacaagaaggatccacacatcttttatacacatcttccatcaaattacaatataaccatcaaacatacacaatacaattatataatggtagtaatatattaatattatagaaatagtatattagtaaaatgataatattaaattgcaattataaggttatgagtaatttgatccctcacaaactaatttaccaacagattcctcttttcttgaaaaaattagaaaattttcaattttttaaaaaattaacataaatattgtcatatgtttgaataaggtgttgcttacgaactttgattttttggctatgtgttttttagtggaatctttaggcgtcattagtctttcaacctaaaattttttccatatattttgataattttagaagaattttacctcttcgcccagtgaattaaggctatcctgaacaaataatgccaccaaatgtttaaacgtacggatatagatttaagtcttatttttgaagaaactaaaataacaaaatttacatttctatgtgtaactaacgctcagattccatcctctcaagctcattctatcgtaatattaccattatattattaactagtaccctataattattatagattatataattctgaatgggtaaaatacttcaaaataattttcataaggatcttcagtgaaagagtttaaatcagttgagtttctaacaacatcttccacattctgattagaatattagtgaaaattacattttttcaattaaatttactattaatacctctttaacgtctattgaaacagttgattgtggacgtgatctcttcaactgagttacatataaactttccctgaaacaagattttcatgaaaattttattaaaaggtataaaaatttatttttaccttattttagcctcattagcaggttcagagacctgtgtaaacctattatgtgtgtatgaatcgtggtttgggatgtttttgataaggtcactaaacttcaagatctcacccctggtgagcttatatagttcctgaaactcctgtggaaaataaaataattatggaattactttgaggttagttcgtgcattctcaactgattccaacaacgaaggtggaattgaatcattttcagttttaaatttacaaaaaataaagtaatttgaaattaaaaaaaataaaataataggaaaatggttataattcattacacatctttaacaattaataaaaacaacaaacatcaaacaccatactaacattatgtgtaaattgtaaaataactaaaaatcaaatcaaaaattattaaagtttattacagattcttatatttcagtatatatcttttaattctctattcttgttcactttgatagtaatgtgtaacataatgtataatttacattattatggcgactatcattataacattaaaaatacatcaccgaagcattatgtttatttatttaaagtttacatactttggtactattctttatcattcccctagttgaccaatgagtacttcgagatcaagcaagtctaacattaaataaaattcggtttttgttacttgttcccaatcagaaccattcttattataatatagattatatgattctccttgacctttaacaaggacattgattaaagttgttgtacttaactctccgtgaactatcacaaatgcagctttatcatttggatgattttgttgccaaataagatgacaattatcataaactgcaactaaatcgtactcatttttagaataaatgacatatgctggaactccatacaaatcatgtcttacaatatcaaatgtataatcatcaaattcttcagctatgtctaatttacgatcttttaacagtaattgtttcattaccatataattattaagatcgactgcactccacactccactaatatatgcacgatatacatgtctaactctaccatcatttattactgctatatgaattaatttctctacattataaagaaaatacacaaaaatgtattcaaccttttcaggtgcttcgcaagtaaacacaaccttttgaccgattgtaacagttgtaacactaatggtatttctaggggataataattgacctttataatgacctattcgataattaataaccctagttcttctcggtcttagaatgttgagtgttcgatttgagctaacgaacttatcaaaatgtataattacaaatgataaaaggattatatttgtatttaaaatattcatattgttttgtaacaaacaactgtttgaacctaataatgtacatgaatttaaattttaaaatatcaatcattgaatattatgaaattattgatacaatatttaatagaaataaaaaattaataagatatgattatcataactttattcgattatgaattattgccccaattatcccttttacggatctattattcatgttaaaactagggtatgtgatctggtttacgtttgtcaaaatgtattctacacaaaggagttcaacactcttaaatataatcagatacatataaaattatttattatttaaatatttcaaaaaatgatgtaaaattatgcctatgtattcaccactgtatttacccttactgtattctgcatcatatagtattgaaatatatcagatcaccagttaaaaatcatgttgaagcgatgttttgaaaggtctaaattagaatatgttatgttgtttctgatgaaattgtgtaatcaaattgtatttatttatttagtatccaagtatttatggtaactttaagtatttgagtaataactgatgaggatttcaagtataaaaagaattaaatagggcattgtataacattttaaaataagagatatttaggtgtatgaatcgtggtttgggatgtttttgataaggtcactaaacttcaagatctcacccctggtgagcttatatagttcctgaaactcctgtggaaaataaaataattatggaattactttgaggttagttcgtgcattctcaactgattccaacaacgaaggtggaattgaatcattttcagttttaaatttacaaaaaataaagtaatttgaaattaaaaaaaataaaataataggaaaatggttataattcattacacatctttaacaattaataaaaacaacaaacatcaaacaccatactaacattatgtgtaaattgtaaaataactaaaaatcaaatcaaaaattattaaagtttattacagattcttatatttcagtatatatcttttaattctctattcttgttcactttgatagtaatgtgtaacataatgtataatttacattattatggcgactatcattataacattaaaaatacatcaccgaagcattatgtttatttattgtaatgttataaccctttattgaaatgctttatgatagaatgggtcagattcttcttttgaaggaggaatttcctcgctgtatgtaataacaagtttttataattttaagttagggcaaaggctttcagatcaactgtatttacattgcctcttaaatcagttttcgggaggtccaaatgtatactcgaaatgtaccttattttatcaataatattactatattttactcatataatacttttaatgtgctagtctgtcaatatttaacagataaaaagtggttaaattgagtttttagaacaattcctaaggaatatccaattgagagggtgtcgtttaggatgttaaaccctgttcctcattactggtccgacggagattcgattaggtactcatccaccttattaaattagtttatcctttattgaccatttagatccttatgttgtaattttaggtgcccgagggagttatatgataaaccactggtagatgtagtttggggagtcgtttcaaagtttgtagattatgacaagtacgtctcaggcaaaaggatacacgaggatgagggtgaaaggaagttggtggattcattcaataaattgaagcaaaacatcgttcatgcccttaataatccacccaaaaacgctcttgataacgtaaactcaatgaggttagaaactttcaaccatcttttttcagcgatgacagggttcgggaggttcttggatccgattccgagctttttaagctcattttcaagtgccaaacggtaaattatttccactttcaacttattaatataattttttagatgactgaagtggtcaatttaaccaaaaagaggctaaatgagggagaggaacaactttctacctcgataagaaatattaaaaaaactgaaaacattctgtcagatttggaggaaaatattaactacatcaagaaaatatcaactggaaccatttttaacttctctctggactcaaagaaaactgtagccaaggtattaaaaaccgaaattgaggacctcagtaaaaggattaaagttgtgaaggaaacagttcactctggcaaaaaacgatataaagaagttaaagatgatatttttaatctgtttaagaggagaaatctactcaaagccctttatttatctttggaaaatgatacagactaataacattttattatctgagaaagtgtattactcgtaaatgttaaaataatattataagtttaaactttaatcgtttgattcaatcttttctttgtcaatatattctctatcaattttgaggaaagttcttctatattcctggatagttactctttcccaaccctgttctgattttacaaaatatctttggtaaactaaactatcaattgaaacagtgatttgaacgagcttaggatcacctggaggtccatttataataacttgagtgcatcttttagcaccgtcataatcttccaataaaattgaattctcttcaaagattctaacaattctaaaatcacccaaaggcgttaaaattacttggggcagtccaaatgatggtttgctctcgattatgaaaacgctttcatcgaaagggccggttacatccaaatgcctttcaaccttcattttatgtaatgattcttcgaattctttgggagttaactcttcccatgtattcatctttttcttgtaaaacttggtcaaatcattactaggaaaaaaaataatgtaacacaacatatgtttacttccgtaagagtaaacaacaacgtttttcaccctattaggaccaccattcgaattccaaatcggataacctccgtcaataactctggatacgttttgaccaagagtagctccataggtgtaaatcattatccctaaatgcttttgtttaaccagtgaaaactcgccatcgccattgcttgaaatatttagagtcatttcagggttagatcttacatgtgtatttaaaccgaaaaaaattattaataacgtcgatgttaagacaaacaataaagtcctcatgttacataggatgcctacaaaccggaggacttcacaaataaaaaatatataaaagttaaaaaaagttaaaactcaatatcactcctgtactattcaacatattataaataaatatataaaatagattaaaattaaaatatatatttttgtatttctagatctgagtgtctaatcatcgaaactttgtgtaatttcgttaaaattgaaccatcaactcaccgacagcttaaacttagaattaaatcagaaatatctgaaatacgtaacttaaatttttttatcttcattttattcagatcttaataatatttcataaccaatatgtgtaatcatacatctgatttatatcgacggtaatataaattgttcttaatttaaaaattttggttttatttcatttaggtttttaattaatacttcgtttaagaaaataaatcgttattatcaacaatattttacatgtcaattaatttaaacaataaatatactttttatttcatgttttagataatttgttaaaaatcattattcaaaccctattcgatcaatgattacttcgagatcaagcaagtctaatgttaaataaaattcggtttttgttacttgttcccattcagaaccgttcttcttataatacagattgtatgactccgatttacctttaacaattatattaattaaatttgttgaatttaaccttccgtgaactatgaggaatgccgccgactgctcgtagtcttcttgttgccaaattacttcataattatcataaattgcaactagatttaaatcatatttacaggaaataacaaatgccggaagcccatacaaattgtgtctttcactagtaaatgtaagaacatcaagtggctccgctatatctaatttacggtcagtcctaagaatttctttcattcctgaaaaggtgtcttgatcaacctcaccccaagttccacttgtataagcaagatatacatttctttggcgattgggtcttataactgctatatttagtaatctttctacaccataaagagacctaacaaaaacaaaatcaaccttttcaggtgcttcgcaagtaaacacaaccttttgaccaattgtaacagttgtaacactaatggtatttctaggaattaataattgagccttatattgtccaagttgatgagtaacaaccctagttcttctcggtcttagaatgttgagtgttcgatttgaactaacgaacttattcaaatatacaattacaagtaagataattgtgcctctatttaagacacccatattgttttcaataaaacatttattatatcaaacatatagatttaaattttaaaatatcaatcactgaatattatgaaattattgatacaatatttaatagaaataaaaaattaataagatatgattatcataactttattcgattatgtattttcaacccaattatacttcgatacggatctattattcatcttaaaaatatggtaagttatttaataaccctcttgttctcaaaatctattacaaacaaacaagttaaacactcttaaaaatgataaattgtatcagaaattatttattatttaaatatttgaaaaaataattgataaattattactattaatccaccacaataatgacccttactgatattctggatcataaagtattgaaatatctcaaatgtgtggttaaaatcgattattaaaatgatcttataatttttattttcattgtttatacccatataaaattaaaatttatgtattttttctcaactgaaaatacattatcaaaccagtatgacatttgatttaaaagttttgatactcttgcaaaattcattattctatttgcacctcatttataagaatttcgagatcaagtgtatttaacgttaaataaaaatgtgcttttggtatttctttccaatcggaatctaccttagtataatatcgattatatgattctccttgacctttaacaaggacattaactaaagttgttgtacttaactctccgtgaactatcacaaatgcagctttatgattttgattattttgttcccaaatgggacggccattatcataaattccaactaaatcgcactcatatttagaagaaataatatacgacggcaatccatacaaatcatgtcttacaatatcatatgtattattatcaaattcttcagctatgtctaatttaagatttttcctaaggagggctttcatgttttcataatccgtctcttcaatttgactccatgctccattaatattttcaagaaataagtttgtgtatccctgcggatttctaattaataaatgcactagtctctctacatcatcatgaaagataacaataagattttcaacgttttgttcttctccgcaagtaaacacatccttagaaccgattgtaactttagtaatacgagcagtctgcagtgggatatataattcttctcgataacttagacccctatgattagtaaccgcagggattccagggtttttaatatcgaaaatttcgttcgaagtaacgaatttattcaaatatataattgcaaaagataaaataattatatttgtatttaaaatattcatattgttttcaataaaacatttattagatcaaatatcaaattttaattttaaaatattaaacgttgaatattataaaataattactaagagatcaccttgtaaaataaaaaattaatcgtatacgactatcataactttatttattatgaattttcaacccaattatccattttatggatctattattccatgtaaaattagggtatgtgatcttgtggtacatttgatgtcacaatctattctaagtctaacatgttcaatgctcttaaaagtaatcatttatgtattaaattattttttatttaaatacttcaaaaagcaattgataaattatgacaatatgaatccaccacaataatgacccttactgatattctggatcataaagtattgaaatatctcaaatgtgtacttaataatcaagtttatattgatctcatgaatagttctaatattaataaattttataatatgtataacatttctaaattatttattaacatatttaacatttacaactacaatatatttatttaaattaatattatgcgttatgcttcaagatttattttcctattatttcactctgtggcttcttcttcctttgattgtgccatcatttcagtatctaactcattcaaccttgagtaaaatttacttttggatactttagtccatttttcatcaatgtattcgtaaaatagctgattttctaattcagtttctttcaatccagtagaagttgcttcttgagacttttgttcttcattttcttcatcatcaaatattgatcttaatattgtaggataagacataagacatagatcttgacccggttctaatgtttttgattcttgttttaatttttttttcaattcttctaatttttcgtttttttgtacttccaatttttcaagtaacttaggtagatctggttgtttttgttcaggttcttgacccttttcagattcactttgataaggttgttgttgttcctcaccatccgaactcaattcctcatcagtttggaaaataacattaacgttgacaagtgttgttaattgaagttccccatgtactataacagatgtgcatttatttgactgatctttagcggtccaaatgggctttcctttatggaaaactccgactacttgaacttcgtctttcggtataaatccagttccctttaatccatgaagattatgctcatctactatgtatgatccatcattatcaaagtcaacaatttccaaattacgttcattaagacatgcatcagaaagaatatcatgaatatcctggtcaattaaatgccaatcactcatacattggacaaagaaaagactttcagttacgtagtaatcggcagtggtaagtgatatatacattagtctaaatttatcataaaattgtgtgactgaaacagaatcaattccttcactatcaccagaacattgatatatgattttatctccgtctttgacagttttatatttatttcttgataccggaatagctttaacagtctgtacaggccctttctttcctgaagtattaactagcccaggatcattgtctagatcttttaagttaatggcattgtcggcagaaaaaacaaatttattaaaacatattaaaataataaatattaaatgcttataaatggttaacattgttctcaaatattaaatggaataatataaagaatgagcttaataaatattataactattaatgatctaaattgtggtaaaaagattataatatttagatcaattaatagattcggtataaacttatggccaaaatttaaaaattaatatggattataacaaaaattactatttaaataatcaaaaacgtactaatctgtattagattcctcatataatcccaaaatggtcaacacaacaccaaattcatcccaactatttaaatccattaaatgccattttagcaaaaaataatttttgtcatttttgatttattatcatgtgtttaccaactgattgggcacattggggtgctacattaaccataatatgtgtttattgtgtcgagtgaaatcattgttacatactaacccaaacccctcctacacaccagtaatgtgttagttattatttgtcctatatatatattgtcaaatatttttattagtcttttaatattccaaatgcaggtttatcaatcttcattttagataaaatgttatagaattttgagaatatactgtgataaaaatataaccaattttttcacataaattcattgattacaccaaatacataacgatggtcagttttactctaaattctggatatttataacataaatctaggaatcatttaataaacaaacactttaaattaacaatgtataaactaataataaataattgtttaaaacacttattctcttttaactaatcaaatttaatataaattgtgtaattactaaaatcttccgtttttagtatatcacttgttatatatctaacagttttcgagttataaaaaattatttgtaaccaaaatttatattatttctcataacactcaggataaataaactaagatcacttcgtttactaatcaccagattcttcttcctgctgctcttgtaatattatttcatttaacaattcataatatcgattttttgaaacaccttcccacatcccttcatttttatgataaaatcgttcttctattgtgtattcattcagtatgttacaataaattaaactatattctccttgaaatcctctagcttttacgaaaccacatttatccataagaccactcgattcccagatagtttgatcaccgtcatatattccaacgagattgtacctgtcctttggaataaatagtgttgatatgtcatcatatacatcttcatcagatatgctaaaagtttcatggtccatttctctatctaaatataacaaacggtcagtaagagtgcaattgaccaataaacgatactgttcttctgttctttgaatccattcttgctcaaccttttcataataataaaagttattaccaagaaaatgttgtgaattgataaatatcaaaattttttcttcgtaaatttcatataattcaataaatactgctctttcagcaattaacgtggcagtccaaatcacaacatcaccttctctaataagagttgctggtggttgaggattgaatataaatgaggtaataagcaatggcccatcagtatcatgaatcactagagaagattgttgattgggttgattgttcaaatcaacctctattgagattacacatttatttaaaaagataaagaataaaataaacttttctagaaacagatcgttcataaaacattgaataagttaaaatttaaattatttaaaacatacaaaagattcaaatctaaaaattattaaaacagtctctcaaattaaaattgaaatcaaatttaactgaacttttatgatcaacataaaatacaaacgttttttatttctaaatttaactatatcttataaaaaatgtattaacagcattcgagtatattatagattattgtatctaaaatgttaaaccacaataattcctaaagttttcaacaattgaataaatagtccttcatttaaatcatatgaaataataatataatacaaagtaaaaattaaaaagcaaaccaataaacttatctaacttttattcattaaatcattgattttgagcactttgatcacgacgtctttgttcttcctcagcatccaaccttgccaaaatattgtaaaacattggtcttaacactgcaacccaaccaccttccgtattataaagataaatgctggtatgttcattttcaagcctaattaagtgtagttgcattaattttggcgcttgaattggtccgtggattatagctcctctgcatttcaaattaatatttcccgtccatacagtattatccccgtcattaactttacgtacttcatattcatcttttgtaacaatagtagttgattccattccatacacttgattatggtgaatttcgaaagtttgtgtgtcgaaaggcggttttatatttaaaacacggtcaactctaatactagctctaatacttaaatagcctctattagttattgatctccatgaatactgtaaccaacgaaaatagtaagtaacaagtagtccattatttagtgtatcaatggtcaacaacttattaagtccgtaagctttaattatttgaattgacacaactttctcaccaaaaacgccagaagtccagatattttcattaccatacttaacttttacaacatttgattcacttttaagtgaaaatgtccttgcaagtacaggcccatcaccgctatcagaagttgaaaaaaccaagttttgatctggattttcaatatcaaagacttggtatgacttaacaaacttggaaaaaagtacaatattaaatattaaaataaaaacatatgttttaaaattcatcattttttattttaaatctaagtgtcaaataattcatatatttcaaagaaaatttaatataatctaaaattaattttaactctaaaaatacaaagaaataataataaacataaaatgttttttaatactaatccagaaattttaagacgtctgatgatctaataattcactttcattaacccacttaagatcatcattatattatattaaacttgcaaatcatggaatttcttcatcaaattcgtcagctatttctgccagagcttctgcatccaactgatttaatttttggtaaaattgttctttttcaactggctgccatccatcatcttttttttcaaaaaacaattgtgatccttcttgtccacgtcttaagtttacattaaccagttttgatgtttgagtatcaccgtgaaatattattttaaaacatttatcttcaaaattttcacgttgccagataatttgattggcttgtttgacctgatgcacataaatattatcttttggtgtcaggacccattcagctagaccagaagtgtagttgatctccaaatcataattttcctcttcaaacggattcaaaagatcaaatattacagaatttttaatttgatctaacaatgagtaaaacctattgagtggaatctcattccaactgtaatttacattttcaaaataacttgatcgatacccatcagggtaaaatgtgctcaacaatgctatttttttatttccattaagagtgtaaatatcaactagattgagatcacctcctgaggtttgtccatcccacaaagtttgatttggaactgaatcttttaccgatttgactacaagtccggctcttgggcagaatgtaatttttgaataaagttgattagattctgtaacagcttcaaaaattctttgatggtctggatttgagatatctaaaatttcattacacaatgctaatttaaaagcaactacaattgagaagatcacacaattatgaatgttaattataatcataatttatgattaaaatcgtttaataagttcaagaaatattctagagtgtcaacgattgtagatctgttaatttaatcacagatttattataaaagtcgatttcaatcacacacttttcataatttagacaaataaacaggggacaaaccctatttatttgtattttaattagttttttcttacttattttttatataactaatttgagatgtagtaaaaaattttttccaacattcattcatacattttgtattaatttttaaaataattatacgatatcgctagaatttattacattaatgttaataaatattagatgttagggttatgtgaaccataattaatgtctgtttgctttttgaatattaagtttttcagatcatgttatcattttgattcaaaataactctatgaaacccttcaaaatatattaaaacttgaaactcatccaaactaaatatgcttttgaacaaaccatatatcattctgcaatcggccacctaattattctggtttaaaaatatggattgtttggcttagtatacaaaagtactttattgattaatagtgccagttgtgatatatttctgaaaacacaattggaaagttcctatactacacatagttattattattaataatgtgaaactatctgggtttagtaaatactaatgaaataatgctttatagatgaatatccgtctacacattatataaccaaatactaggatcctagtaatatctataaattttttgttttaaaattaccataattttgaatattgccgttaatatttaattatttacctaagtctgtactgtttaaaacaaggttctaggagtaaaattttcataattttaatattaggtaacataaaatcacaaaaccataaaattaatggttttattactatttaaactcacttgtcttgtttatatactcaattagattagaaaatttgaaataatcataattttatttgtttcgtactatgaaattctttatcaatctgatcatcagaataaataagctaaaattatgttacatggctaagatttaagttttttgggttccttctagataatacgaatacatgattttaaaagttattttaactatcgctatcagagggttcggatcccattgctttttgataatcatatttattcattagatggatatactggatcttttgtattctaacccatccattttcggtgtttttataatatctttcttctatatattccctgttaccaactgatttatgtggatagggctcaatcggtggtaatggaggcaacccagaaggttctcctgtatttccaaatgtttgggaattctgaggagtgaatggaggaacaggtagtgtaggtggaacaggaaatctgtatgaacgaatcctagtttggggaccactaacctgctgttgactaggtttttgcccggtagtcccagtttgagttcttggttgtacttttggtcccggttgtaaattctctgaatatggtgtaaacagtcctgggtgagtaacggtataaccgacttgttgttgcgctttatgtcggggatctggttcaatttgttcagtttgataaggacccgttttagatggttgtttatctaatcgaattctcttttttagtggcagatgctgttgagattcatccacaggttccagctctttatgttgatcagtttgttgaaaattagcttgatatgtctcaggacgtggtttgtaatgttggtatggaataaatgctcccgattgtcccggatattcttgttgctgttgaactgttggtccatgttgtgattggaatgtaggtctatagggtctaaatgctccaaattggccaaaatgtccttgactttgttgaggttgataccccccgggttgtccttgttgaggggttggtgtatacgtctgatactgttgaaattgctgttgctgatgttctgttcctaattgctgttgtggattataaggttggtattgataaacatgctgcccgccttgttgagcaccttgttctgttcctgattgctgtggtggatgataaggttggtagtgctgaacgtgttggtgatgttctgttcccgattgttgtggaggttgataatgttggtagtgataaacattctgcgcaccttgttgagcaccttgttcagttcctgattgctgtggtgaacaacttggttgtatatcacaatcactatcagattcacttgaatcttcaagagttacaatttcaggtactagctctccactagaattacctgatccttgtgctccttgaggtatctgatctcttggttgatatggagaattttgctgttgtgggtgatatgtttgatattgtccaaatggtcctgatagacgagaatgcacttggggtaaaggaaccgtaaacctaggtgtaaattgtctgggtttatcagttttggggaatatattctcgaatctaaaatagtttgtattaattgatggagggattttagttggtgttgggcgggatttatgcaaccatgccacttttctaatactttttactggttcaggcggatgctgatgatggtgatctggaggttgagttccagatttttgcaatttggattcaacgataagcaaatcattttctattgcttgcagttctttttgttttttttccaacaaactttcgtaccttcttattttggagtatatttgcgatttatggcaatcatcgtgttgtttctcgattctaattgcatttttaaaatgccgtatatcaaaatgcaaacaatctattcttttatacaattgttccctttgtctctcaagtacctggtccctttgcgtttctaattctttttgtataaatgtatctagttcttctgaatcaatttgacccgaattttcttcctccaatttctctaattccttttgcaattcgcttagttgttttgagtattcatcactttgtttttgtaattctttgattttctcccttctcatttcctttagttgtttagaagatccattaagactactttttttaaggagtttaatcatttctttaaattgaaatactgaatattgaatactttcaattttagcattaacattgtctatatgttccttcgcctctaaatattctttaattccgcccgtaaatcgttttttctcgagtgatcttaaatctctcctcaaacgtttaattttctttcttctcaaaattagttctttttcaattttttcaatttttttatgtttagtactcgtttcttcagatttatcttcatattgatgagccgaatttttatcttcgttttgattactactttcacctcctgcattcccatttccagcacctgagccatcatctgaatcgcctcctcgttcatatccatcatcataatcatcataatcatccgattcatcataatcatcttcttcttgatcttcgtcatcatcaacttcatctgaactgtccgtttcactagtttctttatccttatcctggtctttttcataagtttttttatcttgaatctccacttcagaacagggttcagtatcaataatatatttttcaagtttaagtagttcttcaatttttaatatctcatatttcatggctgatattttttccagtaaattttgtttgatcgatgatgcgttgaacgtttcaagtacccctgttaaatttaacgagtttaacttttccagttggccttctaactcagcgagttcttcttgttttttagccaaaatcttttctaattcttttacctttttatttttactcttctcttttggttgttccgatttatcgtggatatcatcgtagtaatcgtcttcgtcgctttcactagtttctacatcatcttctcgatctagttttttttcaagctcgagtaggtcatcagtgataaaaagttgatattttaatttactaattttaccttgtaattctttctttttagaatagtatattttccttcgtttaattttttgttggtcagtttgaacttgatcaacaagttcaaactgttcggaaagaccttgtgaacttgatctacctcctttgctctttttggaatctttggaggtttgctcaacatcttgttgggtaccggtgccagtttcatcttgtgtatctttttgatctttttgtgattttccagctcgtttttttgcaaggcgtacattttttacaaattcccttgaaaggtgcattctcataatatcaaattgttgagttaacctccctccaggatagaatttttcagaagacagtgatttataatcgtgcagaatacttatattaagtagcaaaggcttatccaagtctccatgaactatgatacgaatacatttgtcgcttatttgtggacaagaccagatgatttgatgattatggcaaacaataacaacatcgaaaacattatatggtgtgaaaacgtaggctggaattcctgaaaaaatttgtcgttgaatcataaaagtgtcagtatctaaaattgctctcagttcaaacgcccttgttttcattattgcttcaaagcttgaattgaagtcctccattgatgtttctatccaaggtacaccttgcttaatataaaacttcacatattttacattatcaaccaccgatacaataaaaagcaatctatcctcaccataaagcctatataactttaattcgctaagaaattcatcgactgatgttctattccatatttgacgttgtttatcaacgacctttacgattttattactggcattgggtacaattgtaaccatagtaacattaccatatacatcttcgagctggattgcaataaaattaaagttgggaaatgatatatcaataatgttattagatgtaacaagcgcacagtatataaatattagtacaattgaaagacatctacaaaagttattcatgtttaacaatgttataaatgtttgaaatttaataataaaacccggtcaaacattacttataaaatattacacattgtatggaaaatacaataaaaattcaaattgaaagataataaaaagatcttatatataaaataataataaaaaatagttaaaatgatggttaaattattagtaataaataaattaaatgtaaattaattgtacatttacacaatttcatctaataatatcaaaataataaatattcaatcaattaaatattgatagattttaattttgaataattgtcaaattagataattaaagaatatcggttaaaagaataaatcaatacacaaataagatattaggatattcagagtgacaagcagttaagtatcaatacacacacagatctaataattgaagttaggttatgaaatgattaaaaagtaatagaaaatttaataagtgtatatgaagaacataaataaacaatatgagtgtcataattaaatcataataaataacattgagatagataatgagttagaaaggttgtggttaagaagtttatactacacacaggcagtgatgttaaaatagtgagattaaaattatacaaaaaggatcaaagttataaatattattcaaaatgagtaacaatatacaattatacggttaaatcaataactagtgattaaattatgacaacatcatgttccaaatagggaagactcagataacaattatagttaaaaagtattattaataattaattacattttattctaacataatttaaaaaataaaatatataaaatagattaatggaaaatatatttatttgtcgggaatataattaggttttgttatatttctcacaataaatttcttctatgcctcgagttcggactttaaacactaaacctcccccggaaggatgggaattaatttccgaaactttggaatctctcgatgataagatgaaacaggcccagcttgaatccggagagggaaaacgtagaactgaaatcctgtggcccatttttaggatacatcatcaaagatctagatatatttatgatatgttttatcaaaaaaaactcatttcaagtatgtttttatacacactctactatatataccagttctcataccttccattcaccactttgcttatattctaatttaacccaattatataggagaattgtatgattattgtgttagagagggctacgccgatgcaaatttgatttccaagtggcgtaagcagggttacgagtacctttgttgcctccgttgtatccagacttccggccaaaacttcgagaccacctgcatttgccgggtccctaagcgagaccttgagcctggaaaggtcattgaatgtgttctttgtggttgtcgaggctgtgctagctgtgatttttaatttaataccacttagtatgctgatcccacttaacacttgacgttttgataccagtaatatattcaagtatatcatatattaataatatataagaaacgagtattatttttggaatagaaaaagtttattgtgttatcagtgtaataattgtaaaagagtgtccgggtgtgggaccctggacagttttccgtaaacaacaacacttggagtttgattaaccctaagttcgtttactaccgcctttatgtcatcgagagtcacttcatcaattaggttttccaagtctgaggggtctagaaccctgttgcagaacaaaagctgcctaccaacgtcctcacacactaccgctttgtgctccaggctcatgtgaaggaaggatttaagactatttttgccaccagaaagttcatggttggttatcttcttcatcctctcgaactcgtccctgacgagagtgaaaacttggtccatgttcccagaggcgtaagctccgttaactaccaaataaatgccaaaaagtccactcgttgagtgaactgtgttaaaggccatgcagctttccacaaactcgtacctgttgaggacgttattataaaggctagttgtaagtccttttcctgggccacctgtactaaaacttcctcctccgcccaagattgactgcaaaagagtagtcacaatcacctgcttactatcccatcccttgacaggataagcgactgccacatgcgtaaaaggtgtgtcgccatctacatacctcacacctccggtgtattttggctccaatttaccaacatcacctataaaatattataaaaaacaaataataatgagtttcaaggtcaaaaattgtatatttttgtagaaaatacctgaagggtttggaattgcgttgtattctgagaaagctctcatggcccattttgaaagctcatctagtcccgaattaacagccactagtacacagtttttgggatagaaatgcttaagcatgaagtctctcatcagttctggcgtgtagttgggttcactttgctccaggcagtaattgaagttgccaagagtgttgttgtgccaggctacgctgtggagatgctcggtaactagttggtctgcgttttccaaaactcgctttctcttatcggccagcctatgcttatttgcagccaactcccatgtaagaaagcgtgggaacaatacatttcctatattaaaattagacccacttaatagataattgaatgtattaactgaaataaaagtaagaataagttaaaaagttaccaactaaaagattaactagaaatggcaaatcttgtcttagaaactcagcttggtaaactgtatgttcgcgaaaagcgttgcagctaacgttcgctcccaaagtctcaacggttttaatggttctaaggtgtgacaaatgggcagtgctatgaaatgccatattctctatcattgaggcaactccttgattatgttcatcttcgtgggctgatcctgcatttacatacagcgccaagtgcgtatcaaggcctcctttatccaaggtcgcaatcctaagtccattctccaactttgcgtactggaacttgttatcgacaggggtaaacttcccctcagagcccctcacataaataggttcagtcataggaacatctttgtaagggtaatcttcatcagtgtttgatccgaaataatagaaattgaactctgggacctctgaaaggacagaatctaggtcctcttttaaaaaagggacttgtttatagtctggagggttcttatgtattttatccaaggtctaaagtgttattaacattataagtatgaagtataacagaccaaatgatgaagtattatcaacaaagaatagattttataataatatttaaacacataaaacttatctagtggttatttataaatattaaaacttactgtaaatcgcctaattctactggagcgaattagtccattaatattccttaaaaaccccctcatatttatttattcaaaaattacaaatttaaattaatatatacaagtaattatttataaataataagaaatcgacaattaaaccctacacaacatcaatgaccgaaaagactaaaaatcactgtaaatatccacacaattaatttttaatagctttatgcaaactttaaaatctagtattaaaaaatctaaaattggaaaagtcccgcaaataggccttcgtctagtaaataagctccatgatgggcacacctctgataaattttggtatttttcatttttatttagaaaaatctgattaatttaacatcataattaacttaggatcgattatatcgattatgttcggaatcgcgagaattttaaaaaattaagtccacattctaagtgccttttaacatgtgttattaccaagttggataggaatttggttaaaaaaactcgttccgacgagttactagtttctatttactccgacattattaacggaagatcagctccttttttgaatttggaactcctaaacatgattttggtttcatcatacacacttgggattccactctcaagtcaacagttagaaactatcttagactccgtacaccagcatatcagtaccagtaacttatttaaacattacaattccgataaaaattccgattcaccaaatgaaacttcacctgttaggattggtatagaggctattgtgagcattttacattcacttgcaaccttagcaaggagatttccattacatttgggcagagttagagattctgcagctgttgatttgttcgtcttaaatttggagtcatttttgaaactacttaatcccagagagttctcacttgtattattctccttccacaaccttaatcttattaataataacagaaacccagagaacgtattttatagagttggaagcgaaattctagacacctttgataaccaaaccatttcaactgttttccatatctcagcaaataaccgaaagttgcaagaacttttcaaacttttcaagaaaagaattgattccataatcttgaacaactatcccaatacttctatccattctgatacaattactgacaccattagtcatgggaattctgtaaaatttactggcagagaaagttgtaacatactttgcggattaataaagactggaactttagaagactttcacaagtcatttcttgcacagagcatttccgatatgaacttacaggaactttgtaacctttgtagcctgctgatatccaaaaaataccctgtagatctaaattttaaaaccttatttgtcaataaactacagaatttagacctaagtgggtctgtagttctggattttctgagtgtttcaaactgttttcacgagtgggaaattgaaaaccatactgttcttgacagactaatcttggcaataactactaacggcaattttgtattcaatcagaagtcgattctactgttacactacctgacacggctcaactattcaaatttaaactctcttttagccttgtttttggacaaattcagatcgaaccatgtaaactcatcccagcttattctcttttacaactctatcatgaatatttattcggttaaattgagcgataaaggtttagatttggggaaagactctggctttgaagtgattttgaaacttttgagtagggttgaaagtgaaatactagggtttgattttaacaagttaggcaaaattgacctgtttacacttgggaaatcaaggaatattctcatcactaagaaattactaaaacatattcatgacaccgaaagcgtcattgataacttggatattatttatgccataactaagaccacagatagtcctgatttgtgctcaacaatcaactcgttacttgctacaatagatcctttgcactttttaaactcaaattacattaaagttaaagattttacgaactatttgaatattgtttcaactctgagaaaccttgaacttttaaaacaattgactcaaactacattggatactggaaatcacttgaacaacttcattatccttttggcaattttaaattgttgtaagaagttgcattattttgattcaaatgttaaggttctcatgagtaagttggtttatttattttcccacacacgttacttaaaggactatacaaattctaatactaaggcatctttactaagtaccaactttgataattcactggatgactttcttagtgttctatatcacttagattactttgccagttcctcaaactatgataaacaactaacgcagtctttgcaaaactatatcaagaatactgtaaataataataaatttgttgaaaacagaaaggttgtaaattgtaaaaatgaatttgcgaattttgaatctgtgctatttagtttatctgcactggtttttaatgctgttttaagttcctcagcgctcgttatccacattaaatactatttgtcacaatctggtaccatttcaccaactgttctcaagtgcctctcaatgaactcgggatacctcgacttgtttacattagaggaactcaggctgattgactcaattgagtttgaaaggcgttctaactacaagaaggaagaaaattcagttcagacgagtgtattttcaatacttggaaaaatgggtataaaatcagtaccagaagagcaagttttcgattattacatagacttgttaataaaataatttagtatttatggagtttgcagtataatatttagtatatattacgtatctttagcaaattagtgtagtgagaataaccgaaattacatatcttcatatgcttcgtcatatgcttcgtcccaagtccattttagaagaggctgttcaatgaagacgtggtttggaattggtctatcgacaacctggtgtagatgcatagtcatgtaagggacacaggtaccatctctaagtctggtgtgcattttgctgagctgactatccattatctgaagtgttctccttgcaaggtcatcagtatctttgaaaatcatatcctataacaaaatgtaaggaatgggaataaacagcgttattttatgtattatattatcctatataacaatggtaaaaagtagataaaagatacagtaacttttcccaaacaaaagttagtttcttcaatggcccagttagggtccttcttttcaaggtccttagtggtgacgtccttcccggtgtatacacccgagaacgcccgggtctggacgcctttatacttaaaaaacccaccgactctggaaggtattagtcggaacattaaatattaactaattcatggggaccgtaccacataccagcaattttaacacatatgaagctattgaataatttttaatcttgatacattaaataattaataacttgaataactatggaattaattgtagaatgtgatttcatcaatatttggtgatacacccctttatgtaatatataagaaataaatggagatcattaactaaaaattaattattttaattttatttatatttttttcattaaacttagttaaataacaagtttattttcatgaatatgttgatgggctgattccacatttatcaataatttcaaatatttttgatttttttacgttttatttattaaaaatttttatttaatatttttattattttttgccttttgaactcatttccaactgtatactccacgttttcacagtttataagtactaaccggatgtcgtcaaatctataatttttattgtgcataacgccacctcatattaattttataataatttagggtctaattttaatttatctttcatctatactataatttaacaggttgatcccgttatattttgtacaatatttaatgcgggtatcaacaacaccgaaatatggtttaccatcagtttctcctaagcaaagtttatcttaaactgcaatttaaatttataaaattattatgctcctctggaacatttgaatcacattatcttcaatgattcaagcttatatccccgttcaacaacaatcttagaattttttaacattgttacattaaaagaccatttctttgccaaaatttggcattccagatattttaaaaaagttttcatttataaaatttacagatattcgataataaattgaacgatgtccgaatgtgataccatggagatactggcatctgccgagcttgaattggagatggctcactcagtttcaaagccaatcccgacaacttctgggtttttggttgattccaatattgactcggttgatcaaaccccgttacggctttcaaatcgcaaggtttccaagttaaccgacgtggaagaaagcatatcatctcaccctttgatttcagccttgtttagcactaggaatcctagggatgtttccagcggagtttcctccggcattaagagcataaccaagggcgttgtgattggagccacaggtctggtcatctgcccggtggtaggactatccaacgatggagttaagggatttttcaaaggtgttggtgccggagtgttggctgccattagtctaccacttgcaggaattggcgtttctttataccaagtcacacggggagtaataaacacacctcacgccatttgtcagaaggcctccgggaaggtttggaataaagaagaccgcgtttgggaagataactggtattctctggacgaggagtataggcaaatcaagcaatacataactgactcctcaaacacggaaaattttactgatgggcgtaatagagtaaataatgaggaaggtgagggcaaaaaagtgtttgagactgagttgtacgacatacttcaagtgcctacaaatgcaagtcaggagtgtataagaaggtcatattacaggttagcactaaagtaccaccctgacaagaacaccaatgctgatggcgacagtgactacaacgagattttctcacgattgggcgaggcttatcagattttgggagatgagcacaggcgcaaaaagtatgacgcccacggtcgttcagctatagacgagatgccaatcctggagtctcagttgtttttcagcatgttatttggaactgaagcactggagccccttataggtaaactccgcatggctctttacctggagcttgagatgagggatgatttgtcaaaaactcagcacgatttttataagcttcagcaggttcgcgaggtccaaatcgcagtgtacctccgcgagtacatccgcagcttcgtctgcggtgaacacgacgagttcagaaagaaggtgattgatcatgtgaaggaactctgcaagaacagcttttcagtggccgtggttgagactttgggctggacctacctgaattacgccaaggagtacataggaaagaggtcgtcgttcctgggcatatctggcagagtagccaagactaagcacaagaccaggaacttccgcaaatatttcaagacctacgtttgctttttaaaaaccgcgattctagaatctggccacaaccgcacctgtgatgccgatgaacctttgatttcagatgtgggagtcaattataacgagaagtcgattccagtaattcttgatgctatgctcaacgtttgccttattgacatccagaacacggttcgtgccgcctgtaagcgtcttctcaaggacatgtcagtcgactcatcatggcgtctaaggcgtgctgacgcgctactcgagattgggaagatctttttgcaagttgccaaggatttcaagccccagttctcagccgaggcaacaaacgacactcgccaacgtatgaacatgcatcagagggataagaacgagcgcaggaacgtacactactcaaacgagcccttttactaattctctaatctatttatcacataatgtatagtgtagtatattatattatattattgagattgtgttttattctatatttcccttcaccagtactaaaaaattgtcattaaacattaataattttatcgataaatataactttataatctaatatgagaagtggaattaccttgtggaatccgattatagtggcacgttccctgaagcattggcggcagatctcaagaccatatttccttatgagtccgtgacgattaaagcaaacgcagctaaaaaataaattatttacgccaaaatataaaagattaagaacattcaattaaaataattgtacaaaactagagtagacaaataccattgatgacttccctggccgtaagttttaggatgcctgttaaaaagatttcccattttaagaaaagataaatataaaaaaaaaacaataaaaatattatcttagtagttgtcgccccattagagaaccgtcaaaatcatagttagtactagtacaccatatactgaatataattacacattcacaagctgatattgacagtatgtcaatgatatttcagtatccttaataaatacgagatggggtatgaaattaaagctctccttgcgatttgtaaaactatgacatttataaaatggattaaatctaccttctcaaacacatttccgctaaattggcctaaaacacaattttaacaatgttataattcattgttccccaatttaaccggggaagttaatattatgaataatatccgatgagggtacctggaatgttcccaaatggatgatatctgcagactagtactatattatcactacaacatgagacgccacaaccaataaactgaactcattaatactttattcagtacctttgtgtttttccacaccagctgtgtaaatgctaaaacattaggattcctggttaacactccagctaaacatgttttatccttctttatacatataattattttatatgcatttaaactgccttacatttgtcaaaatcatattctttaattcctaattattctttagatgtttagagttgttgagtattgagctaggggaacataccttcgtaccaaaactgaacagcaattccttcattaaataatcttttagaaacagataaataattggtcccagcgagttctgagtaatatagcggcaaatcacatttctccttggtaatctaactcattaatgtgtgtatatttggtcacctttaaagcctccttttcagctgatttagccaattcatcgttcctacacaatattatataattatgctattgtttatggtgtgttatgagagtaacgtatggaataccattcaagtgaattaaccgagtgaattcttctatagtcgttatgtgcaagtagaatcaaatctttctaaaacacattttgaaatggtacattgtcatatgataatatatcgatgtaagtaaaattctacttgaaagtggcagttattacacagggaaaggagaggaatcaacgacaccacaagttctaaaacaagcataagtgatacacatttcattaaaagcaaacttgaaccttacacaataaaattatttataaatttactgattaaaatgattaatgtttatgttataaacgtgttatgtcgttatgtggtaggttggtagaactgataataaatttaaagaatatatttaaataaaaatattactttaaaattaaatgtgaatgattaatttacaaatgcttatcttaattcggataatgaaatactctacaatttgcataaattccagataaaacctttactatttgggtaaaaatagcattttacttgccgtagctaagtgaacagatcatggcaagtctccgatctcataagctgttcagttcctgtggaaagcaactcatgatccgattccacatcatcaattaaaggcgattggaggagatccgtttcttcctggattttctttgacccaagggcgtagaggagtagtcctgcgacaattcctaggaagcaaaccacatcaaggaagttgacgctcgtggtactatcccctgcaataaagcgtagagaaaatgcgattgaggtgagcgggaccttaacggtgcccagtagtagggtaaaggtaactgacccgtcgagcattatgaacacataagcgactctaatggcggagctgaatattatgtataggcagtaaatcttaaatgcttctaggcagttatcgcacgttggtatcaaggtgggcccacagttttcctttatagtgttaactccaaaaaatatacatttatacccgtttacgcacaggttatatagtgagttgaagtaatctttaacgctggtgaatgggagagtgaatagaagtgtatagagtatgttatagaagaagtgaaataggaatccaaagaattggtattttactacatggaagaatttagaagtgtactgcttctctctgagcgcagacgcaatggagtctggaactgatgctactagatataacatattgttgtagaacctgttatcggaagtgtctgtcctgttcagaatcggctttaacactgcgaatattagtataattgctgaactgatatactggtagaagtggtacttctttgacaagatgagcttacatgaaaccattgtaagtgggactgaaatttgacccaaaagaaccagcataagtccgctcgtgtgggcacttccattggcggataaaccagtggataacatatcaagaaatccaagagtaaccagcggtcgtacattaaaatgccgtttcatatattcgcggttaaataaaaagcatagtagggcaatacaacaaattaatacccaaaatgtaaagattatcacctgaatactaaacattacatagtttttactatggtcaataaacctcttataaaacactgtcgttaaaacatccaaaagaacaaatattatacaaattataccgaaagactttgaatataaccatttaaaacagacgcaaaataggtcataaattgaaattaaaaaagaataaatgcgatctaaaaaagaatacgggggagaattatcattctgaacacttccggatgtaccggaaatgcttgaatcaagagaagaacctctcttcaacatccctcagccaagtgtcattaaacgttctaaattaaccattgttatagttctatcggttaaatagatatatttaatttaaaactgggaaatagtaatagaaataaatttcgaattaaagataataaaatcaaataaaaatcaataaagctcaaaatccgaccccatataatatttaaaaattctcatttgacattaaattattcaaatcatttacacattattgttctttaaattttaaataaattattatatatgagattccggaattcttgtactcaaaactcacaattgttcaacaatcacatcacgaatgataaatgatagaattttagatctacctaagatctttcagaaattttattatttcatttttttactaagcactttttaaattctcatttttaattcaacctacaatattgttatcttaatccttacttatttaaattttttatattcctcttctaaaacttacgctcaatgaccttcctctaatatttaacgtttttatcattttattttattttatttgatgtattttggctaaacttttacttttttggcaccgttccgcattcctatcctttgtacatcaatttctagatttttagatttctcacttattttacaatcttctttatattttataccatggtttaatttttaataattaatgtgtataattgatcccagctcgattttcgcatgtgcgactttgggttgcggggtattgagtaccgcctacttagcttcaaatatcgataaaattcctcacccatcagaatgtggtttaattggactattctatcgcatgaccaatattcactcacatgaacctttggaactaacaattaagctcaaacacgtcacttctagttttataaggtcgaaatatttcatcgaagttgtttctgggaggtttaaatatcctactgaaaagtttagccccaaaaacaatgaaatacatttcgacgtacctgactttttattttaattttcgtagttttatatacaatatcctatttattgactaataatgtgtatacagattgacttgtcggtacatttacgacagtgtgatgacttcataacaattaatttgtacaggagtcatatgctccaaaataagctttgggcgacattaaaagttacacttgataatattttaaatataccaaaactaaggagctatacaatggaaggatcgcattttactaaaatatatgtaattccctatccagactgttatccctcatacagataattagtataagttatttatggtagcattactttgatcatggatgtagttttcaatacacaggttcggttcgaacctagtggaccaattggagtctcctttaaaaatgtatgcactcacagagctacaaaacgatggagttaaggatggtaattgcttagaaaccatattaattagtatattagcgatgggaacaatatagttaggaatatttaaaacactgttattgagatttgatttaatttaatttagtggaggaatatatgctggagcatttgaatggtgaaaccccggacaacaaacatctcagattttattcgtttgcagtttcaggcgaactcgagatcattaatgatttaactgtatattataaagaatactattttagggccattgagctcacttcaggctactgggtctggtgttattggaagagcagagaagatttcaaggtaccattgtacacatttctacatataaccagtagtaagattaaatactattattactaggagaatataatatcttaaattatagaataaaaaaaaggagaagggacggatacctatgctgtcaattgctttaattgataaaaataggatagacaaccacgagttttttgtacgttatacagataagaacggatacaaacaagagtttctggcaaagtgtattaatcggagcagggattcatgggtggcctgcatgaatgagtttatacaaatggcaagaacagtgtatttcaatagtgataggtaccaacgtttgaggaaccaactaaacattgacccttctgccttcaaggaagatatgggcggatcgccaaggtttaggttaatcggcgaaggttctgattcagacgacgatgataacgaagaggaggatccaggaattgattccaatgaattaaatgacaaaatggacgaaaattctgaagaagatgatcatatgtacccacacaaatctgaagatgattctcaatacgcatcgatggaaagaaacatcctggaaaacaacataaaactcatggaatccaatttctatagaaatttttaacaaaaatttattacaaattaaccattcgagtttaatctagatttatttgtcacaacaactccatccgtacacaccccgcaaaattgtctaaaatgtataaatgaagtttaaagtggaaattatcacttttgtaaaatattgattttaaactttaatttttaatttagtttatattactttttacgctattttcaaacttttggctcacactggtgtgtgaccaagtataaacaaaatccttgatatccccttaaaataccgatttctctaaattttcaaatcattaacatttatttaaatcagggatttataagaattcgtactcaatcgtccacatactttaccatttcgttgcgtagtcgcatcaggaattttttagttttagtacaaaaatcgttgaatgtgcattttttttccctacaaaatggcactaaaatcgaccgatacacaagattccacaccggactcctcagagaaatcagagttaaactccgagtctgagtcacccgatgtgaaggtgaaaaaggatacattaacatccaagaaggaccggagaaaaggcaaaaaaattatacctaaggatgcaaatcttctcaaaaatatacctgaagagcactatttcagtgatgtgtctggtgtctactaccacttcaagaagatggaatggcgaacgatttgcaaggacccttttaacaactctaagagatctcagaagacatttggcattaacaagtacggtttctacgaggctaaacgcagggctgagaacaaggcttttgaaatcactgaaaggaatcacatctcgaaggttctgagcgcctgtaaccagaatctcttttccgaaaaccacctctgccagataccttcttacccttctacttcttataccaattctcaactcgataatgctaacaatatttccctcaaaaacgtttttgataatagcccttacagtggcaaaatgcctccaaactacaacaattatagttgccataacggcaattttatggtttatcatttaaatgacaccactgctttgaacaacttaccacaacctgtaccatatggtccaattccagctgtaaataataggttttaccactcagttcctcactcaatgccctgccctctcctctcaatggataacaccaaaacctgtttagccaacaatacccacacttaaccaactgcagtttaatttttaacatttactttacactttatacggatcatggtttaatagtaatatacatttagttagatattaagttaatctatccaagtacacagtgtatattatattagtagtagtatagttacattggcctgtcagattactaaagaggaatcatcctagttgacaatcttgccgattattgtccaaatttgaaaaaaagatgagaatccatctcggaacaaatttgatttcgccaaagggcgtgtgcgattgtctaaaagatttactgttcaaacggttagtgtaggaacaaagatttcttttagtggcaagattgagcactttcgccaatgcttactagtcattagtatatcatcattcaggcttagattatgtagcatatttatgaaactagtacattaagtctaaaaccaatatcatgtttcctaagttaatccatttccttattcattttagcatttaattgtatattttataccagattggaagtaatttttcatctataagtttacagcatataacagttccctcagaatctccactgaaaatgtaaccctaaatactaataaaaaaatttcaaattacattcttggcaactacagacttgaccctcttattgtgtaatttactactggctaaaactgatcctacagcagtcgtaatcagtgtgtcatacctttatcagaatcaccatgagtgtcaacattatgaatagaaaccagtcctgacttgaatccgacaaccacagcagagtctgcataccaagaacaacatattactatagttataattatttaaatatcaagttatggtataataattttgaaaatacctttatcatttggaagcgatttaatggtttgaaatgtatcatcttcactactgcacacaaatacctatcattagtatttataaactggatatattagtaggtattaagtgatacctgattttctgatgataaaatgtatttagagccgtttgaccatttgacacttaatggtgtaaagttaagtttagtgttgaaaatacaggttttagagtttaggtcccacagccttaggtaacagtcaaggccgacagagataaaggccttgccttcggagtgaaacgataggcctgaaatctcctttttatggcctttaaatgacttttgaaagctcaagtcccttgttaaaaataaggaaatttcgccgtattcgtttcctaccaaaactgagcccttatttactcctccgaaaacggccaccgaagtgatgtaaccttctggaagcattatttcgccatgtttagtactcttttcaatattatacactctaaaaacacattagtgcagtgtttggagatttgaaccaaatcatgttagatttggtctaatataattaaagttaagtggaggaatactgtactgtttcatcggagccgccgcaaactaggacgttactatgtaaatccatacactttatggaaccctatagttcaaaatttagataaagagcctacttgggagcatagaagcctgaaaagctgtgtaaaaggtttattctggccgttaatttcctcatgttcagaggggccatctgaggaaggattctctggaattttcaaacttttgagcttttcgggatcataatctaaaccgatcaaaacaccttcgtaacctccgcaaattagaagcattttatatattacaaaaatttatcacgttacacaatttattttaaaactcatgagatatattaatagttttattaataaatatataattatatagattatattacaattataaatatcatgctattttacagtgaaaatatccttaatgttaaccataggtataattatgggtatataagaatctttccactaaaattcggattttggtatattttaaatattttttaaaatccaataacttttgatttacacatttccttaatatttgttatgagttgggttttgagattttttgattcagtgtggcctaatgcttctaatgtgagcatcatagatgttataatttaacaattttttccatattttaatccgtatattttactttagattttaagaaaattttcatataatttttttaaaatgtacttttagaaacttattttttgtaaaataacataccctttaaattaactttaattttttgtcacagccataattggtttcaactaaattattttaaataaatcaggataatttcaggtaatcttatattttctatgtgtatggtattatcagatttttagtacacctattatactgttaacattttctttagaatgttgaaggatgtttaataggactcaccaacttgagcaactggtccatggccaggattgtatttttcgatacgactctgatttctttatttcacctactgatcccaagattataaatcccaaccatgtaactcgattatgctatatataacttaaagattaattatatatataaatatattatttcgcctataagttgggagttaattttgtattaggaagggatagatgttgagatgacattttctccgcagtttaagatgtttatggatcaggttgacgctgtgaaaaagatgatacagtcgatcgatgatgggtcagattcgattacaaagttgatggcattgagccatgacgttatgactagtagtcagagcagtagcgtcagctcgaaaatgaacgctctaattgaccgtacaaacatagtgtgtactcagtgcaaaaacctgattactacccttgaccaacttaaggacaatggccaaagtgaaactgagaacaggatgcgttcaaactcttacaatgtgatcgtcaagcactttaaaaactcaatgaaacgatatcaggatgcccaagtcaagttcaagaagtcaatttcagaccgagcaaagagccagattaagctcatataccctaccatgaaggatgaagaagttgaaaaaatagttcaggataccagaggcattcaaaccgtggaacaaatcgcaaaatcaaattttcttgaggtttgatttagatatttacacattgatagttgttaatattttttagaattcatcattaagagatgcagtgtcaaatatacagggcaaatataacgatattctagcgcttgaacaaagtatttactcaccatattatcttcagattccaatattaccaatattaattatattaactaaatcaacaacactaaatatattaattataggtatggaacaactgaaacaaatgatggttgagttggcaggggtggtcagctaccagggggagcttattgaccagattgaacataacacattgaaggcagtggactacacgggaagggcacatcaacagttactcaaggctcaggacaataaacgcaaaggaggaaaactcttgatgtggttcactatcattattattatagtaggtatcagcattatgataccaattttactaaaaatcacatgacagcccttttactgaagcatataatccctaatttactcgtaatttcgaatttggagcaattttaactggaatccgctataatcttggaaaatttactttccaatactattaaaattgattactttctttatcaaaacctgttaattgggttttaaagaaattaaagaaaagatattttgggaatggttttaattcaacccacacatcaacaccagaatgtaaccatttttcataatttcatcatacactttggtacacatttaattcattattggtgtaaaacttagatttctcaccaaaagtgatggattcccatgtatactgggaactacaaccactaggtgaaaccacttgcggtctacatgctcttaactgtattttccaagtaattcttagaaacttattttatacatatatttacttaaacctaccgggttatttcacatttcagggtcctgaatttagacttgcggaactccagtccttatccaaagaatgtggtaaactcgaacgtgatttcctatctcaggccggtaattgcttatataaaaacaataataaatatgcagtctgtatatgtgaaattaggtgtaagcgaggtcgaatgtgaaacaatggccctaagtgaaacaaccggtaattttgattttatggtataaaattacacatttcattatttaatatttttttattaattatattttaaattagcgggatagaatttattaggtacttgaaaaagctctggagaagaaggaattcgtatgtacgaggctccatgtagacagcataacggaaggacttctagaccacaaacatgcctttctactcaatattaaatcacattgggtatcagcaaggaatattcatgataaatggtacatctacaattaatactctggtttatcactattatacataaaagaggaataattattgtttaggctcttgtttgatagtaagaaggagaaacccattgagttggtattgttggagtttttgagggagagtttggcggggaaacatacggcgtttttagtgaaggaaaaatcaggaaaaaggctcccggtttttaatcacaacaaggactttctgacccctaaccaaaagttcgaacccctaaacttcacagtagaataattcgtctaatccaatccatgtcactttaattttaatttaatgaaaaaatttcaaaacacattccgttaatttcttaaaataagaatgtgctattcttatttcaccctatttaggtgatttgatataaaacatttagtaaatctcatttgtatattaattttatttatttctatttaatacaattttaattacagtaaaatggatcacattgacgtcaataatcaccagcatcttgttcaggcgctggaaggctcagtttctgccgatgaccagtaccggaaacagtgcgaagaatatttgctcaaagtatgaaataacatttactcaaattattctattgatttatccactattttgaatatttatcccgtcctatctccaatatccaattcttaccttaaattttgctaaattttatcttaaaaatttctataatactattaattacttccatatattatttaaatcctatgtctgtcatgtttaaaatatgttatgattagttttcgagcacgccaggatcagtggcttctctgatgagggtaatgtcgaattttcagtgtgatgatagtgtacggctggcagcctctattagacttaagaatcatgtggcgaccttttggcagatcacatctgaaattgacccccccgaaccccctcttatcgcaagttcagaccggacttttcttctggacaatttgtacctctgtttggtaagtgtgggaccttctcagaaggggattcggaaccagtgttacgagattctgaggcatgtaatgtttaacgctgagataaacgatatgaagaatttgttgtcttcaatttcttccgatctcgggcagagaactgactcagaccgtgttttatgttctctgtactgcctcaggaaggtcatgaccaagtatgaatatcacggaagtggccaggcatctgaagttaacgaagttcttactgcgttcttggcaccacttatggcggtggcacaagatgcatctaaaattggtctagccaatgacgaagcagctactctaattcaccttgtactaaagatctacttttcatcagcactactaacatcgccaacaattcctatcctcagggactcaatgcaacactggatgactctcatcaagtacaccatcaccgaattcactaaatggcaacttacctggaataaaaacgatctcgatgtttctattacactgttattacaatattactgctatattacacagttattgtatgactacattaatagcatagttggtgtataatggcgtaggtgactccattttctgagttggggaatgaggatgaggaatttctgtctaaacttgagcagttcaagtgtttgaagtggtccatgagaatactcaatcgcttcatttctcgacaaaactcgttctcagatgatgaaaacagacaaaaattctactcactctttatctcaaataattattcaagtacatttttatactcagttatggtgtataactttatttattatattattactgtattaatattattttattatttttgataaaatgattagatgagcacttgatgctggttctgaacatgctgaagctggagtcggagtacaagttgaccttgaacaatctgacccaccacctgttgtggtcgtatttgagacacagtctgaattatgattcacacttccactacatacttaacgggaatctgagtcagataataggagtgtactgcctgaacacgttcaagtacaccaaggaggatattagcagttacgaggatgacccggagacgtttatacagtcactgtctgatgtgtgttatcagttttacagtaaccgaggaagttgttcggactttctgcgtgatctggttaaaacgtaccctgaggaatctttgtcccagatcaaacagattattggagcgtgtttcgagaattccgacagcgctgtactctactcaacactttcaatcataggatacgtgacggacaagcttataaagaagacccgaccccctccgaacgcctacactggcaataacctcaaatcaataattaataaggaaaacaagaagaaggttaaaccaaactacgagcatctgcaaattgacggcgaagagctcctagagcgcaaagtggttaattttcttaactcggaggatgtttggatcaggaccagagccgcctggctgtgtggctgtgttttaaaacgcgccttcaactttaggaactttgaaaccctcaaaggcatttactttaagcttctagatctcctcgtggatccagaactactcgtctcagtcatggcggcaaacgcagtaattgagctcttcagagtggatgatgacaacttccaagacctcatcgttaagtcaatctcagtactgcttgagcgtcttttcctcctaatggacagaattgagcttgaaagtgtgacttcagtacttggcgagattgtcgacaattactccttcgaagttatcccctacgccaaggatatcatcctcaatatctgcaacaatattaccaagaatttactcaaccaagaagctaacattaaaggttccctatcctctactcagttatacacaatactacatttatacactttaatgcactatttatatcatttaaaaagtacgttttatactgctaactataaaagttgatatatcatgtgtagtggactacgaagatgatgagaagatgttggtgcgatggagtatgttgcaaacactgaacaccataataagattattgacccccactgggggtagggagaagacagggaaggtgaaaactgaggagaaactggccctggagcttaacaattacctgatcatcatcagcactattgttaacctgttaaagctactgtttaccaggcctgatgagaattcgttcgattacctagacgaggcctcgctgcttctggcaaacctggtcaagctgctcgacattgcatcgatcaagcagcttgtgctttcttcagggtttggattcgcaaacttctggcagctgttcctggacctgctaaacctgatcaaggtccaaggcttcgagtacgtgacggacttcgcaatcttgagagatccgctggtagctctggcccacagagactcccaaggctttgttgcaatactcgaggatctattcaggatctgcagtgaggcctccggaaacggcttcacagacgaggtccacgatgtgctgtcagacgcacttgaagttagtctaaacactggagccatgaactcgatattcgatcgcctgcttcaggactcttgtaatcgactaatttcactcctgagcaccttcaagaagcagaacctgcatgatctggctcacaataacatgcaattcatgagattatcgtgtcttttactcatgtattattatcaaaattctccaaaattaccttccaaccaaaacaccatccacaacattaaaatgctcacaggtacaacttaattattactttctcttcattgcataattaacacttctatactatatgtattggcatttatataaaattacctcactaataccgttataaagtatgataatactatctataatagtataaaataataatttaatttgtggcttagatttcatattgaagcactcattgtattgtacttggagattgggaaggaagtattgtattttaacatgctgtacattaataaagaataatgtaacaaaagccgagaacacctcggtggttaacctgcttgtaacactcctgcaaagcctaaaggcctcagaggaggagactcaagatgagtaccagtactcagactcagactcagattctgactcgtatgacgattatgatgatgagtacactgacgaagacgacgattcagagtgggaggagtacgagtttgaagactcaccactgaaaagcttaagtgaagtcaaagttgcaaaacaactcctactctcgctcaatgaacccttcgagcagcatcaactcagtggtcagcaactaatgacctttcttaacaccatttgacaatccctaatctacttttatatccttatattccttcacacactttattatactacaagatttttacatgctcacataatttttggatacatacacgatttttatagtataacaattttatatagatacacaatttttatatgcttacataatttttgtatacatacacatgtttactttcatatacttacacatcatggcacttttcatgatgtttattaaaatactaagattttgtagtaaataattagatcaatgcagtaaatttattaaaaatcgctaaaattgataggtgaaagtgttaaatagttaaaaaaactagattggagcagtaaataagtagtattgagtgatggaacgattagaaagtggaagtataattttatgcaaaagtgggactaaaaggcatataaattgtggaccagatttgggaaactatgtaaatctcagaactaattaatttaaaaatattttagcgattcaaggtgatctttaaagcctttttctcatggatggggtgagaggagaaaaagcgactaatttccgatcagtagctaatttctgtatttttagatctataatgtattttattccaacaaccgagtttaaccatggaattgacaaatttttttaaaaacgttaatttttaatcaaatttctgaattaaattaaaatttaaaccgatatttgtacactagtcatactaaatagtatgttaatataagccatgctgaagagaaacataaacgtaaagctggcccaaaaggcagcgatgttcatggccggctttactctgtaccaatgcctaagaatcgcactaacagcctctagttttgcactgaaaagattttcaattcccaggaggaatgtggatattttcatcaccaagatccacaactctatggaggttgcaatttttttagggattctaataatgaccttgtatatacttttcacgccgaggaaatattcccattacaataatttagtctcagtggtaacaaactggttagtttgtgtgctttactttgtggttttatacgcgtatgctggaaacgggaaactaggccacctaacagcctattactggggattagtactctcaggattcgcaatgggcatgaaccagtcgatagtgatgtcggtgagcgtggacaacatatcatttttcgcaggagcaatcccctttgcaggagtccaagtgtcgatataccacattctgttcctcaagattaacagaggcagagaagactacgacgttgactactggatattggtgtatcagataatattcgcaataataatatcaacagttacagctatcctttggacagtgggatttttaggagagttcacctcaaaactgaggagaaacagcttaattgacaataccgaagttcctacgattgtaattgatttaggtgaacaaaactctgatgaaaatgataccagtactgataatccaaacttcaatagcagcgacaacgactccttaaatagccgtgacaaggactccttaaatagccgtgacaaggactccttaaatagccgtgacaaggacgcggatgatgaaatggattctgatgtaagattgggacaaaaggggctagatgaccttaacagaaagtctaagcgcgtatttataacagatataactagaaaattgagcaaatcgctgagtttctttgtggatttatcgttttacaaatcggtgtgcaatgcagcatcgccgattctaatgagcacaatcgcaatgggtctggtatactttgtattcccagcaattgctccatacaggttcactgacttggtcactgcacacaggatagacgtgtcaatcctgataactttcatcgcccctgcagtcattaacataattttatgcggttacaacattggtccgaattgtgactggagtgttaaaaagtactggcacctgatctggctgtttgcaattccgtatttcatctgcatagtcctcttcttagttcccattcactaccccgaatcccatttcggccaactcatgactagtaatactgcagttctcgccaccgtgtgcttcacattctcaatcagtcacgccattctcaagactgttggatttacgggtgctggagtccaaagcacaaccatacccaatcccaccattgtcaacaacactgacatccaattcaaccccagaggatcagacgcgcctcaactgacagttgggaaaggaaagccaaacggcagaaaggatcggagtaggaacggtcaggtatcgtcgtttaacatcttgctgtcttacttcttcttggtgtttttcgccttcttgggtgatggttacatcaagaccattaagcttttcgaacgcaatcgggacttctggccgacctatgacatgggtttctttgcgagtttcgccttctggactaaaaaatcatttaaaaggggcttgaaatcctttggtgaagtcttcactctcaacgtcagagatcagctcatgacgtgaaatctttaagtaagtaaatttattcctttcaactttgtacgtatatactatatatacttgtatagtagtatggcaaagtatatgatacatactagagtacaaaagtaactatatagaataagtacataaagtgtatcggttatactacaagctatatacacattaactgtagtatgcattataccatatggtatatactttaagggtactatacactatgttatacttgatagtatatgcacatgtgtatatagagtattgtaacattattagtgtgttgaagtcacttttcaaggaatatatctacaagttttagagtcccagcgagctcatcactggagtgcgagttctgaatcagtatctttttgatgggttctacatctttaatgttaatcttatccctgatgacgttagtcatatcctttggagtcagtgaaattatcttaatcagctcagaaactaagtcatacaacttagtttcaccttccgtttctacaccgtacccttccttagctgcctcttttgaagtacccttctcatcctcctcttttactggtttcggacctgtggtgcccttgatgaacttgtttaatctgtacacaatgtagtctatattttcatgaacgtggaagaagaaagcctccataatttcgtcatccttaatcaggagcttttcacaggccagtttgattaaatctattatttctccgttctctgaaccttctgaagtgtttactatgtctgtcatattcttattaaggaccaagtaagggtcaatgttgtacttgttctcctttagcaggtcattcattatgttaatcagccagtttactctcatgttcctgtccagttcaatgtacttgctaatatttgaatccatcaacacttccacacacctatcgaagtccttcaaaccagcatccccactataagcatccaatactctcatctactccattataaacaattagttattgagtttcagtaatgtataaccaattagtggatagtatgctactgatatatcaactgcgtaaatatttgtaagtaaataatttgaaccagtcggtatctataaatgagttgcttgaaatgcttttcattgagtccgtagacgtggtgcaagttctttaaatcgtcaaaggtttcaaggaagatgttatctttgtagtggtcaaccatgtacttgaagtagaattcgattcctcttttttcaaggtactttcttctttcttctccctttaacccaattaagttacacaagcgttccagcttatccatatccactagctggtcagagtcaactgatgagaagataaacttttcaaccacttctgcagtgtcgtaaaatgtgtttagcccaaacgagaacttggaatgctcagaagtgatctcatagtcgtcacaaatcttgaagaatcggtctacattcctgagcacttctggtccaatttggcatttatcaaataatttaaagaaaataatgttcaaatggtcatacaccacctcgttcagtacaatgttataacccatctgaacataattataacagaatccactggtaaataaactattgtgaaagagtatactagtaaatatacataataagtgtgaatgcatacgtatagtgtacctgtgatatctttaatctgtgagcgaatggtttgatatacttggtaactatgtctttcaacttctggccctcatgttctttaatcatattcttcacatgattatagaaaatatactgaaaaaacattagaacacatgataattatatggtatcgacaataatacgatataatatttaatacatatatattaatataactgtatgctcaatagtaactatgggttatggtgtggtattgtgagaatgagtaatgggtactgaaaagcatttagcgtgtacgatttccacggatctgtctgaaagtttgagaaatttttgtatcttttcgagttgttgcagttgcttatctgttggttcctcgattgtgaatacgtagttgattctcctcaccactgacggataaaaggggtcgaaaaagaagtcagttgtgttcccaatatcgtctgcgacatcatctattggagcatttgtcaatctcagaacctcctcctcatagcatctttcacatatctttgtggtttcctcatctaatttctcactattcgggttatcgacattcaattctctattccaatctctatttgagctaaaggattttttacatatttagcaactcactttatatcatcatttcttaaacaattccttatatacacatacttccaatcattatatccattctcaacaagtctaaaatattaatttagaatacgataactattaagtgcggctattcaataaagtattgttatagtattagctacggtataattattaaataaaactgtttgttgcagtattcgataaaagtactaaataaaactatttagtataaatatgtgattacagttttgtggatgggaaaatggatagaaagttcttggtttggtgtagggtgtttcctcttttacggtaattgtaaataacccaagccttgtagataatctgagaatctaaaattgcctttctatccttctccttatcaactaaaacggtctttgaggcttcgtactctgggtcaacaggtctgtgtccgacgtggaactcagatgggatctccttgaacaaaggcggcactttaccctcttccaccaacttttctatagcaatacgctcaggatatgtagaacgcgtgtcaattccatacaagggtaacggtctcagtagtttcttctccaaaatcttctccttcatcttcatcttctggcaatatgacagcgtatcttccttctccatcaactcccaatcccctttaagctccttaagccgatccttatccttaatcccataataattttccagtataactttgttatgggatttttcggggaatttccgggccaaattatcggaaaaattatcatctaaattttctgcgggggtttcagaaaaatcttgagaaagagtagtttcaatggattttttaaagttatcctcctcagaactctcatcactggatcctagagtgttaaatatatcaaatgttcctatgatttcatgacatgtaaatttcttaggcttaaataacatattgtgctggaatgctctttctattctgtacatgtacttcgggtctaccagagctgaaactgcagtcgtcactgatctcttcatgtccaaaagtgcttgcatgtgtttttcaacgaggtagaaatcctccaactcagtcgcttcaagcagtgacttcttagaatcgtacaccttctcctttatcaattcacaaatcgaattaataaatactatatcgttactttcatacttcaatttaaccttctccaaatcactcttcaataccctcgtcaagtcaatcttcgataagtcctgcatcaggcacaagaaggtgtaaattctgaaataattcagaaacacttcctcatccagctctaacttactagacatttcctttatatcagagtacacttcccttatgttttctgacactcctgctacattcttaccatccacaccatacttcttattcatgtggtaaaagtgtatttccattattctattccttatcttattaactgtgacctcatttttcgacacgttcagcagtgccaaatagtgttcaaatttgttattttcctgggtcagacccttgtatataatattggagaccaggttaacaaagaatttcgggtagttgttcagtaggaaccgctctgatacgtaaaacacctttgaaatacccttgatgatctcaggaatataatctgtctttgaatacaagctcagcaaatcatctctcaagttctcaacctcgtaagtttctctcttctttttctcttccgcggtttcgccaaaaatctcatcaaatggcactattccatatttatacttaatattgtgtttcttaattcgacctctgttattctgtaattcctctgcccagtcttcaattctatctagctgtgaaggcatgatcggagattctctgaatcgttgtatttgttcgtcactcactcccatgctcttgaacaggtgcaagtccttctcaatttcataaccaaagtcctttggtgttgtgactgtcacaaacggctcgaagtctgtgaagatctgtaccatgaaaaacgtcatcagcattgcgttgaaccggtatcttttaacattgggtggtgggagccccaactccttgtcaacgagattgtacaacctagaataatcatcttccggagtcatgttattagctatgaaatcctcccctgaaatgtaataccctagcacttcctttccgtaggtgcttggcaaatgatccatcactgccaagtagcacccaactgcatatattagtctatacacacttgtctttgatattggtaaactgattgcatttatgtaccttaaactcgttataagctgtcttaatccagttgccacatcgccatctccttcagattccatgatacagaacttattaaacatattctcaggatcgaaatctacaaactcttcctcttcagtttcgttgggatcaagaaacctgtcttcagaaaactcttcatacccaggtactttaatatctgttaaatctggctcctcctctttgatatttgtaagctgcaaatgtagataatcctcattgtttttctccattgggtttttgaacttattaaatgagaagacgtttaaaaagtttaaaaaggacttaaatgttagcagtgttgaaaccttttccatatatagtctcagattgtgatgacttatattatttgcgtctgccagcttactgaaattatctcttcttattcttgttatcacatcaaacatttctgagccgccatccacatcactatcaacagtaccagatggactctttatcatactttctacactattttctgatcctagtcctttacatactctttccattaatgcgttcattgattgattttccagtgtttgcgtatctgaatataaaatcttcagtacttctgaaaagtagtcaacttgttccttttggtctgctaaaactaagtatgacagagcccaaaatatgtactttagtttacccttatgcctaaataaaaagtccatcaactctgggttcatgtcaaataaatagtcaattcctttttctgatcctttgccaagtgtatatcctatcacgaaactcattatagggtttagtatgtgtttgaccatattgtttgactctggcttcaagttatcaagataattttcctttattattctcgacaatcttaagctggtttccacattcgggtcataccaggctgagtacaggttcaagaaatcatcatcgtttgttggccactttaagtctggataattcgtcaaaaagtccttgtatgcctccgattctgccgttgctatattatccacatcttccacaatctgatcatcgtttgcatcttcgtcgatgtctgagattaatttagtctgtttatgtattctgtgaatcactgttaatattttctgtgctcttttcgggttgtactttgccatctgttccaagtgctcaaagtaactttcatgcagtaatcccctcagacaaccctccgagagcggttcaaccttttctccaaagttcagaggctctattccaaacacgtactcttggtttcttttaaaatcttcctcaggttttcctgaaagtctgtcttctagggtccgtataaagttgtttttcagcttctttatgttattgtaaatcataagaaagcctaactcgtacatcattcggccaaagtaatccctaggtggaggtggtctgttcagtagactcctcgcaagacacacgagtgtgtcgtctgaaatctctactgaaggttcgaggttcaactcctcacacaccttttcataatctccgcactcatcatacaaacgttgcgctttattatacagttctatcaacttatccatttcattcttgtaaacccctattaacctacgtttatcactatcccgctccttcaatctcttcaaacgacgttcttcagattcttcctcctcatcgtcttcataatcctcatcatcctcatcgaatttttcaaaatcttcatcgtatgggtcataatatgtgtaatcatcattttttattctttctctcaatggctttattctggcgttgttgtatatattgttactacttataaacaaatattgcgatttattattatactttccccttacaaaccgtttaagactactttctactacattagtgtcacaaatattattatttaaaatgttaaaaatagagttcggggagtacttaaatattagagaagaaaatttctcttgtaacgggggaaaacttttattgttcaaggggttactggtagataacgccaagtgtctggggaaggatgatgtgttaatatagttacaaggacttctaatgtgaagtgagtgcacaagtcccagaatcttaatgtacacatttacgcagattagaatccacagtttgaactggaacttcatacttaccttgcgatttaaacagaacaatggtacataataatatacaaaatgtttcctttcaacattttgacagggatatataaaatattattcttaatttcaaaatagtgccacatacacattaggattccacggaatcctcagaggttaatacattgtaattttattttttatcttttaattttcatcttaaattaataaaaatttgtatattattgttattttttaaatgtgtgactttttattttacaatatcacaactttcttaaattatcatctgctcctaaaaattaataatatataatggtaaataggaatctggaccctttagatgtagatgaaaggttagaattaacagggtgtaaaatggaatatgataaattacaaaactgtattgataagtttgataggtattaactagtgatttactaatttatcattttatttaaatcaacaaaatatattacaaattagggactggaggaagtgtcaaatagagttaaaggatctttcaaaatgtcttgaaagtaagaaacccggctgattcactctgaagttaatttaactttagcgagataattatttggactttctggatatttgaagaaatcgcttaatatttcatctgtgagagcaccaaggaactttggattcacagattctactttacagtcgattggtgagtagaagtcgaatagagtctttgaatcctcaacactaaataggtaatcccctctcttcaaagtttcttcgtctgtaacgcttatgtacacaatctccttaaaatctttaaatttgttttttgttacacctaaatagtagattccatcttcttctgagtttttaagataataatcatcttctagctctttatacacagattttactgttccatattttattcgattatcaaatccatgatttacactatttttaataaaattgtttattcgatatgtattatatgttaaaaaagtgtttgaaatgtatggtttcaaaaaaatattaggtatttttttaagcaaattagtattaaaatgactgcaacaccttgatagtagtatcatatactcaagtataaaacaaacataatatgtactgataaggaaaagattactttttggagggtggcttagttccttcacggaacccatttttaaagcgtctaggcaatgttttcaaataccttttccttccagttcctgtggtcttccttcttctggccttaaatgaccaattataatgacgggtcttagcatcaggatatcctacaaaaggattagttagtgtatacaaatatgtatatcctatacgatatatagataatatttatataatataattgtaatttcacaataatatgtaaattcttggaaagaataactgtttgattggatatgggtataatttaatggtaaatatggaatcaaagcataaaacgcaaaggatgaaaacataccacatgaggcacatcttttttttgtgtcatgaaaggagcgatttccacatctcagacagagagtgtgggttttactgttacaaagaccgaatgatcctgtacccttgccacatttacccattttgtctaataaatttcaatcttccaactgaatttctttagtaaaatgaattataaaaaattatattttataaaaaatggaatataaaaaacaagttttgtgaaaaaatttatacttttgacccccaccctctattactctgatcatctgccaaaaactaactatataacatcataacacatatattccatatattaataaagaaagctacattttatgagagaatatagtatatttgttgataaaaaattaatctaatgatatatccattgttgtaatgagttgatttgtattgtgtttgaatttgttatctaaaagtgtgtttgtgtagctcaagaggctttggagatccaagtgttccttttgacatccatctacgagttcctgtagcttttttatcatttcctcatcgaagtccttttgctcctaaactaatataatgtgtaatattattaccatgactttagcatccaatagagcatttatgatctttataacctttttcatgacctttgtttctctttccaattcattttctgatattctttccaaaagattacttaacataactttgaaagtgactccgtcaatttcgcttttaaatgcccttttaaacccctcatccgacctgaaaaacctctataatcgttttaaaataccctgtagtgtgtaataaaaaatcatcaaggagtgacatgtcattttttatcagctttacagctccagtttcctagaaattaaattatacagattaatctcagagataactagaaagctatgtaactagttatatattacgggcaaatgaatgcacttgagtatctttttagcacaagtttggagtttattgctgatgatgtgatctacgagtttatttgtgattaccacctcagacgagtcaatcaacgcctcgagttctaaataatcttaaaattatgaatctattaaaggtaccagtaggttctgggaatgtttggtagtggtcgtagtaagaaatggtttccgtgggaagttctccgtagaatgacaccaccagaaagttcaactcctcatcttgtatcaatatcttatacattccatcatacatcatctgatcatttgttaacacattttaatattaagttaaaacttactgaatgaatatgtttaacggtgtaatccaatttaagagtaaagttatgaaaatgggtttcagagtaaagctcataaaagttgaaattgagtccattttcaagtatcttaacagtacatactatgtagtcatttactagtctaacaaagtcaaactctttaaagaacaagttatactttttagaaacattcagttgaggaatattgtgagaaaaaggataatcttgtgtatctttatcctttgagaaaagaaggaaaaagtcactagaaagagcaaggatatcttcggatagcagggccttagtgactgtcacatttaaatcatctgtcaacaaatcgtgttttaataatttaataacgttatcttcaacttcaactaagcagtacttaacttcagatgaggttttgtagacacaaactgctaaactaatattctttacacgattttcacagatttttcttttcttacttccagtattaacattttcactagtattgtaacttgtttcatagaagaggtcgaggtacagaaccttggagtcacaacggtcattatactcttccaaaacaataattttctcgccgaatctaagctgaagtttcttgagtttcttggaaattagtaccaataaggggtactttgagcgaagcggtagaaaatccagaatcctctccctgaacctcttttctccgaatgttccgtcctccaataacttgaaaagattgtttctggctgaaaaataaacatcatggttacttctccgtatacatatacactgttctggcaatgaatatgagttaacaattccacactcctacagttattatgaattaacttgctatatattaataataaatagtagtaggggttacatttgtttctaagatttgcgatttgttttttaaatagaaatacttgtcattttgagacacaaatgcagaatcttccttttcgagatttaaatctatggaatcatgatccgaaaccaatgattccattatatgttacatttcaaaatcaatttcaacaatttttataaacataataatccatagtgtaatgtataacacataatatggtacaaatttattaaataataaaatattagctcaaaatcactccccatgggcaaacctacaaaatccattattttattttccacattttttatttattctcacttttgatttcatttaattttatttcacattttaaataccatttaatggaatttgtttaatttaatctggtaaatttgtcaaatcagtagacaatgattattcccgttcgttgttttacttgcggtaaagttatcggccatttgtgggagaaatggctggaaatgctcaaaaaagatattccagaagggtaaactttctcaatccagctctacctagttattctacatattatcattttataatctaatgattaggcaagccttggatgatcttggtttaactcggtactgttgtaggcgtatgattttaactcacgttgacttgatagagaagttacttgtatacaatagtaagtttactcggttaattgttaattttcagtctacgataaaaggaaccaggaagttctttaacaccatgtaatttattaaacagtattcttacattatatattatcatatattatattttatgatttacaaaatgatcaattttgattattttcctcctgtttcttcactatatgttttattattatttggtaacttacttatcatttctctgaagtgatttaatatttcattttctcttctcattctactctcgtacttttccaaggcctttgccctttcttgctcagcagttaacacctgtaaatataataaaactctttagctactggtttaatatatgtatatataaagggtaaaaaggtaccatagactcctttttaattctcatcctgttaatagctctatgccttgatccactcataacatagccaattttctcaaaattttcaatttgttctgtagtaagtccaacttcacctcttctgggtatcctcttccccttttgaatatactgtgcaatggcatctccttcacctggcataagttcaccgccataactcactttaaaatccaaagaagtactatttttcaaaggtttagggccgtattcctcatcactgtcactttcagactcttggttttcattacttttatcattaccagaggttatatcagaataattaggaacttcaagagatttattatcattatcggttaattcagggggtttattctcatcatcagtagaatcatttgacttttttaaagaattaagtttcagttcttgagatttgcgatggttttccaaaaattttgagtaaacatcgggactcgagcttcttgatcttgcatacacatcttcacactttattttcttcctaaacctttctttcgttcttttttccatccatcttgtccttttttcatgttcttggtcagttatgccaaattccatgaaaattatttctgattttcttactacatactggtgaatggaatcccatttttattaaattcaaaagataatctacacactttcaataacacacattatatacacatatacatttataataatattaacataatattttacattaaaaatttaaggagtggtcctaaggttcagtttcaaacggatgatgatgagaggtataatttctcctgtgataactgtctctgttaaactcatttattttttcggaggaattatcaccaatatcatattttaggatcattcccttacttgctgcatttttgggtttaaaaaattggttattttcagcctctttcttttctgggtgattttcaaccactagaacaactttatttcctgagctactaccatcaggatctctgtgtaagcgaacgaaaagaggtgattcagacatatcatctttaacacttttggaattgaacttcttattattataatcgtattcagaatatttgatctccttaaacgagtgatcatctctaacgttccagggcacactgtagcttaaaacttcctcatgttcagttacatttagaagtgtgttattccttgccaggggctcaatatccacaaccatatctgttttccccttctcactaactgtgaactcattagcatcactgtcataagagtattcgtatagttttgtcgacttatcccacctttctatattgagaatccttagagtaccttttttctcgtttgaggcaacgttaaccattctggtgaagactaaatcatcatcttcagctatgactttatctccataaacaactttcccgattttctgtgtcaattcgtcctttactcttacattgtacactattccgaagttaaatactataaactggtcgaaaaaaaataccctagagtttcccacaggagtagcattaccgtcctcttgggtagcctttggagcgttttcatagagttttgccaagtctagcgtgttcgactgtttttgttgtatttctatacccataactccctcctttgatctctcggcatatagctttaaccagcagtccgagtgatcacagtccttgagaataacgtacgactgggttgattttggcagtacgataaaccttgaagtcaaatccatgtcaaaaggtgtaattactccatcttctcctagagatacgttaccaataacgcgagtgaatagtttcttgtaattaacccccactaagtagtagtcgcctaagtcacatatatcaaagttggataattgggaaaagtcattcctgctcaaggcatcgtaaaaaagtgaaatgtcaaactggacgggttccttacccttagtcacgaagacttggtcgttcctcttgagcgagtgaaccattgtaaaggattcgaaaaagctaaaccctttcctcgttactgaatggagcttcatatgcttatcatccattatcaagtactgtcttgaaacgaagaacttgtttggccaaaaattcactgtatcgtagctcaagctccccagcttatccaggaacgtgctcggctttacgaacaggttatttttagagtcagtcaaatacttagtaacgtgggctgtaattatatgtaaatcaactttaactgggtcttcaacggataattttaacttagtaggttcactactgggtgaattaacctgttcgtttgaactggttccaccggatgtggtagcttcactatttgttgagccaccctgtccattggtactggttttaggtggattttcaggtttaaataaatactttttaaactctccattataacactcgtctctgactagaatgccctccttacaagagtagacttccctgttaaaaactccatccccttcttctatcacaagattttccttaaagtaaaccttcccaattctgaaatctatatcctttccagttactctaattttacctccttctccttgtttttccagcagatgcttgtaagagtgctcttccacaggctttggatcggttaaattggttacattcaaatcaattagttttttctcatgattgacatatccattttcagttttttttaaaactttaacattgtacatttcagagttcttttgaaggtcaaagatagtcaaatacttgtcgcctcttatctcttcagactttacagaaatacataaactattgtggtttttatatacatactgaatattctgtttagacccagattctgactcatttgaatcttcaaccacgtcaattagtcttaaattctcgttacacccatcaaagaaaaggcagtcattgccacacctagaggcgattttagcgtaactttttggtttcgatgggttaaagctaacagttgtaaacatatgcgatttcctaactgcatattctttgttcttgtcaacgataaatgtttcttggttcaaaagaccaaacttagggacagtttttacaaaaaaagaattgccttgaatcattacagctctataaaatacatttaggctatccaacaacagtgtatctttacattttattgctcctacggttttaaaatttgcgatattaaaatagctctttccacgtatttctactggattttctatatctccacaaatatcaagatcaactttatcgtattcaaatctctcatattcgttttctgcatttttcctgaatctatctaccaattttgagtggctaaatactgtatggacctcaactatctgttcaaaatttgactccacagtagtagatgcaacttctccgctacttttaaatacatcctccaattccggattataatctcctccctttggaacctttaaaataataacaaatcttctcttaacattagattcaggctgtcccaaaattttgatagatccgtccgacactttaccagcacattttcccgaattcgaatgatcttcttttaatagtatagttttataatttacagagtttagttcataaaaatgatcaccagggtcagatatatttaggtctaaatactgattatcggcttcagcacgaggtataataatgaataatgacacacatataagaacaaatcttatattaaatcccataataaagatttacatttaatacattatatatctagacctattttaaatgtttgagatctttctgttcatgccagacttacacaccccatccatttcagatttttttttcaattttttccaaaattgaccagaattaaccataaaaatacgtcaaacttatggatatacctatgatactatcagtgaatcaattcaattccagattatgtgttttttagatggtcatccacagtccttttcaaatcctcatcacaatttgtactatttaggatggtcttccaaaccttcaacttccacctaacgtttaaattaaaaatcctttcatttttataatttaccttggcgaaccttccagagcattgaccaaggtttcggttctctctgaaatcagcttggtcacgtcaattgcagccataaacagtccccaggctgcctggaaaagtacttccgcctaagtaaatttgagttttaatctacgttacattgcaattttttgagattctaggctctattcttgagtacaagtccatgtttctgtatccatatctaccaaatgccaaacaggcagcgctcagacctaaatattatttataccaactattctatagtattattatgttactctgttcgttcatctgatctaaatagtccatgaacttcaaatgtactctattgcatatttccacgtcagtgtaccctgcgttatacaggttccataacacattcacaatgtcatttcctataaaattatgtatatttattccaaaaagtgtataatataattgtgaattgtgtaaatgtaagcctaccattgagtgcgtataggacatttggaacatgggttgccaatgatttaaagaactgtttctgtgtattttgcttcaaacgttttgaaagaacccatagtacatccaaaagtgatttcgcgtcgagttccctaactcttctttgtagttccaaaacggcaactacatactctcctaacgggatataatatttaatggtaattgatatagaataaataaatcatctataataagaaatatacctgagtctttattataaatgtgaaatgatttaagtatatttgcgatatcagatacactaagtagatggattgattctttaaaccttttactgtaaactatccaaaacccttttgtcttggattttaatttatctttgggagatttatcttctgagccactaagttcatcggagtgtaataatttgtcatttttaccctcagaataatttgaggactctgagtactctaaatacttaacttgttttccagttgaaaggtaattattaatcagctcggtggaagttttcctaagtttttcagagtttgcaaagcacaaaacattccagtaatccttccgaatcggcctcaatttaaatctgtagtatctggctggaccatcagctgtaggaactgggaggggattggcgactggatggccaggccctagcaggcgccttgtaatgaacatatgttattattatcaattaaaacttcatttaaaagatacaaattggtgtgatctccagaacaataaccttgcctttgagatatttctaaagcttattttatttgtattaatactctccagaatgtagagacccaatgaatcaaaatcatacctgaattttaattatatgtaaaatgatgatataaactaacttagaaatccatttagaaagagagtcgcgatgacctttggaatttgatttgttaattgtacttaagtaaagcttgtaaaaatctatagcggctggttctcttgatgcaacaaagtaaaactcagggttaatcttgtcgtatatggtataaataatcctctcagccttcaggagtggttggttattaacacatagatcactttggcttattcctagaaattcacgtcccgaacggacttgtaatgctgaaattttaattgaaaaagaacaatatcaattatatacaacacatacctaaattatgtaatttttgaacgtgttttggtagcaaattcggattctctatcaatttatggcagcttgatactagagattctagctcgtttgttaatgtggctaaaaaatatacataaaattataaattaccagttgaaaaatatttattataacggcttttaaaaatattaaataagaaattatgtttaaaattataaaaaaataacattaaaatataaattctatttatatatggattctatacagaaaaaacaaaaacttgtgaattaattataatttatataacaaaagatggttatttgataagaaagataaaacacaagtcaaaacttatatggaagtccaaaggtgatgaatacgctaaaaaggtagtattcgaagttcgtgatggacccttatattatctagcactttatattttgttaaacactaataatttgttaccatttttttatagtagagtttataaaaaatggtttatcattggttctgggtgtattaatttaaatgaattttatttttattactctgaacttaaacaaatcgaattatcagactatgaattacatttagaagaattgaactgtctatttgtatttaagactccgttttataaagtaaaatcgaaggataacatagtttggacgaataatagttcagacactagactgcccatatgttttattttatcccgtgaaagtcatttatatgtcggttttgataatcaagaaatagttcatatcaatcagaacgaagaaatacacgaattagaaaattataaataataaaatatattaaacatatgttaattaatgaaggtatgttgaataaaaactcggtatgatgggaatagaaatcagtgtgaaggatatggttgactatagaatcttgacctaatacttgaacgagcacattaatattaatatcaataatatattcacacacaaatgatatattctacataccgattcgagtgttaaatattagataaaaataaaataatattatgagtgaataaactatttattttcatagaatcttacttcattgcacaataatttttatttaatcaaattttaatttaatatttgaaagtatcaatattttaggatataaaaataaacacacgtgtttagatttaatgttataaatgtacaaagatactgaccatgtaatagctcagggagcggaagctgtttgtttatacatcattattatactagttattcacaaaaaagttttctaaacattagattgttcaggttgtcaagaaggttgagtttttgggcaaggaatgcgtgttgaagaggagacttgttaagtcatttcggcacaccgatcttgatcagagtctcactcgaagtcgcatggttgctgagtgtcgtagcacatacaaattaagaaaggaaggtgtttatgttcctgtgatatatcttgttgatttcttaaaacgggaaactatctacgaatacgttccgggggacactgtaaattccctcatctctaattcctcctttaattcttacgatcttatcggtgaaagcatcgctatgatgcataacgctaacattatacacggagatttaaccaccaagaatatgattatgacaaacgatggactactttgtattttagacttcggccttagctttttttctacactttctgaggtatttgttttagtcacccattaattttatcaataactgcaatattccaatgtttacaagaattttataggacaaagctgttgatttatacgttttggagcgatgtttgaacccctcacaggtattttgaaatcaaaactgaattttaaattattttttagtttgaggaggttttaaactcatataagtcagttgtttctgaccctgacgagataattcgtaaactggatgaggttaggcttagaggtcgtaaaagagatctaactggctaatttgatataattttacaatgtaattcactttttaattatattagatattgctttggccatctcctgcgcgtttgtgtttttgccgtaaaattccaaaaatttaccatccttatctgaattcacattttaatagagtaacaagtattcttacccattagataatgtattatagaatggtcaataaggtagtcctggtctgtggctttgatcccttcattataatacactcggaactttctcgtcacttccttaatcatttcctgaaatttcgttaaataaattttaaattactggtgttcctgttagtgccacgagcctagggtggtaatcctttatgtattttttgagaacttttggtacatctctcttggggtcgactaaaattaaacataaattatatacgtatatctataaagatttacctgaaacgaaaatgggttgtactagaggcccaaattccttatctaaaatttgttaagtaaaaatttaaaaatatgattaaactattttcaaaagtttacctagggtcttgacaacttgggtctgtttatccatctcttcagggcatatatcagggcaattacagaatcctatcagtatttttaaatcttataagatgatataaccaaccaaagtaaattaaaacgtatttgcccttaaattcttcagacgatctttctacgccatcttggtcaattagtttaaaggtccctcccagttgcggtgtaccatatctttcttcagttacaattgctgaataaataaattaatgtataaagtaagtattttaagcttaaataaattaaattttggttaaattaatacctaattgctgacttcttttcttattgaatgcgtagtatactccggctcctacagccctaaaaatcatctcaaatccagtaaacacacccacaaactgcgatgttaatcaatgctcctttaaatgttatctatgtttattattctcgggattccaactcactttgattcctggattttgacgagtcgagaaagctctcgttcctctgggaacaaatttaattttagtttttatactgttaaacattttatttttattttttagaatttataaatttacactaaatcacatttcaggtaacacactacccaacttagaatcaaaagattccgtaatattactaaattgataaaaatatattgtggatataaataaattacattatttggccatttcttcctgagatttactttcgtcaacttccatctcctcttcctggttttgactttcagggtcgtttttctgttcttcctcaggttctgttacttcaggttcctttgaaggttcaggttcaggttccggctcaggctctgatttaggttgttctactactttatgcttcttaattaacttatccatttcatctttgacgttcttcaattcctgatctagttgttccattgtgtagaggggattattatactttggcatattcttctctctttccacaagtttcatggtgttactgcttaacatggttagcttgtttgagattgaagttctttcattctcaggaacgttgagccacgaattgtctgtacctactgagtattggtggaggttactcagccttgaaaagaatgagctcaaattctgttccttgtttaaataaatattgtagttattttcaacagggtcgaactgtgaggtgagggtattatacatcttctccaagctttctagtgtggctgttctgttttcatataaccagttttcagtttcgttaagcttctcgatgacttggttcatgttcttcgggtccatgaaatccttgtgggttgtttgcaatttatctcttactgtataaacgtaggtttcaaggtcgtttagtgttctgagcctgttagtttcatgaaggtcctttttcttttgtgccgattcgttggctgataatttatcagtttctagtataaatgggctcatcacactaacatctaatcctctgcagaaagagaacaaattgactgtctcgtcaaacttaaacttgattgcccacccatctgcatctctgtccagaccgcctttattctggttagtccttcctgcttcttggtttagctccttctctactttgctcaagtattcctccacttcagacatgttaccttcttctccttcttctttcttctcttcaggcttattttccttgcgtttatccttcggagatgacgtgtattcctgaacttgtgacaatgtgtactggaatgttggaagctggttctttgacgttattctcgggtcgtcaaatgacgtaaaaactgtgaatggagggtctaatttgactttgactgtaaagacttcgttatagtttgttcccacatttgcaactgtgaggatctctgcattgtacatttgttgttgtgagaaggggcctagtcctggtaagaatgtcactgtgaatggtctcgacaacttttcaatgacattgtactttctaaccatgtaatgcttgctattaattgctccctaagaattaatgcaagctgtttatacaaattacttataaataaatacttaaattactcataaataatatatagattaactatagctaaaagtacctgaagaacacatcctcttgctattgattcatctgcatttagtgttttgctcactggtttatcgaacacgtgtgatatcagtgtctgtacacatggtacccttgtgattcctccaaccacctcaactgaatctattgactccattgtccttcctgacactttgagtgagcacattaaaagctctgacaatctcggcaggaactctcttgagcacagcacttcaaactcttctctcttcaagtgacctacacacaaattagttatattattaataattttatacttaccattcaaatcatagtcttccatcaagcactccagtgaatatgacgattccgagtttgctgataaaacccttttaaccttggatgccgtggcttcaaccttcagtctagtctttgtgttacccagagggtccaaattatactttttgttgaattcttggcacatttcattcatcagaaggtattctaggtaccttcctcccaggtctcgatctgacagttctgatagtattacacagtatgttgcgaagaaatcaacgattgccactgttgtatgtgagtgtcctatgttaactaatgccaccgttgttgccttttcatcgttaagctgctttagcctatacattccgtagtccattgccattgcaaatccttctgagactaatctcaggcagttagagccacaggctctgaccgatgcgaccaacaaactcttctggtattctgagaaccaacttggatatgacatcaccacctctctacacactcctcctgtgtacttctctgccaggtcagttaggtagttcaggtacccaaccagagcagaaacggcagatacattgacagttttcccggcatttgttacctaaataaatataaaaatgtaatacaatatactatgtacatagttattactatatctcatataatattcagattcttatttattcatacctgatatgacagttgacccttttcgtctactacaagtggagttgagctgaaaaatttatccagttccgttacgttccagttttcatctttatcggaattcaagttgaggccgagaacattcaagaatccacgacacgtatttttgaaatttgatacaatctgcgtatttgcttgatcaccaaaaactctttggtattctccatatgatacacaagttctaaaccaattaattagtcaaagaatctcaaataaaaatagattgtgttgaaatacaaaattaatctagaaatttaaaaacccaaaacaatcaaagaacataaattaagtaaaagtaaatagcaaataaaaacaaagtaggaataataaacttacggagtatatctttgagatacatcatttaaaactatatcaatagctccccgtgagatcgttgcgacggttgaggttgatgatcccacatcgatacccaggactggcattttgtaaaattatgtttgtaaaaaatctactataaacttgaaaaaatacaataatttaaaagtacagtacataacaggaaaattgggtaaattgcctatggaaacttaacacataatctcgaacaacaagaaacaatatctcttacaatagtctcttcaaataaacacataatatctttaatagtaaaatattaagtacataaatatcatccgtgggggttgacatttattaaattaacgtaaattgaatattttatactatttaattaatattaaaatatttttaatatattgaaatttaggattcaacctaatatgttgaatataaccattaccaatcttttaacatatgactattattttttgatgttatgataaatccatcttctttcaaatattcctttttgaacaagaatttataaacgtttaattaatataaaccatttaatcactatttatataactaatatttgtgttttcgtcatttttacttaagattccatactggattccactgtacaattgtagttagtagaatccttgaatctttagaaatgttataacgtagataaaatataagcgtacagcaccttaagtaagcctaaattaaaatattaccctaataaaggccatggaacgttttatttggtttataagataacaatataactcataccatttatttagaactattaagaattcaaattaaaagtattgtataaacaaataaatgaatgattaaactaaataataaaatttattatgtgtaatcaaacaatacatcattagaagcaagataatttcacacggaatctcacatacaggaaaaaatttagtttgaggaaaatttaaggtaaaatggcaaataataagaataatgattaattataaatgttattaggggttactaaggattttcatggttatatgtgtataagaggaaaagttgccaaatataaacccccctctaagtggccccctttagtaaaacaactgtcaccccaaccatcctattgggtacaggaacgaaattttcacaaaatattatttgttattcgactgtatttaaagtatactattgccactgcatctaattttaaaattctctagtattgttcagtactttatctaattaacgatgacatcaaaggacgagacacctgatcaggaggtctacgcttttaatgctgatatctcccagcttttaagtaagttttagtcttattatttttattctaattttgtcaacaaggattcgttgtttctgtgtccgttatactactttcctagttcttgacaccctccaattatattttatccttccacattaaaatttccattgatttttgattttttataacaatcttgaaatgttatttgttgtatttattagatccaactttttaaaagatcctacgcatattaatcaattgttcaggcttgatcatcaacgcattttatagtaacaaggagattttccttcgtgaactcattagcaacgctagcgacgcactggaaaaaattaggtatgaggcaatcaaggatccaaagcaaatcgaggatcaacccgattactatatcaggctgtatgccgacaagaacaacaacaccctcacaatcgaagattccggtattggcatgaccaaagccgacctcgtgaacaacctcggtacaattgccaaatccggcacaagagcattcatggaggcactgcaagcaggctcggacatgtcaatgatcggacagtttggtgtcggtttctactcagcatacctggtcgcagataaggtgacagtagtgtccaagaacaacgcagacgaccagtacgtctgggagtcaacagcctcaggccactttacagtgaagaaggacgactcgcacgagccgctcaaaagaggaactagactaatactgcacttgaaggaggaccaaactgagtaccttgaggagagaaggctgaaagagcttgttaagaagcacagcgagttcatttcattcccaatctcgctctcagtagagaagacccaggagaccgaggtcactgacgacgaggcagagctagacgaggacaagaagcccgaggaggagaagcccaaggacgataaggtggaggacgttactgacgagaaagtgaccgacgtcactgacgaggaggagaaaaaggaggaaaagaaaaagaagaagaggaaggtcaccaacgtaacgcgtgagtgggaaatgcttaacaagcagaagccaatttggatgagactcccgtctgaagtcaccaacgaagaatatgcagcgttctacaagaacttaaccaacgattgggaagaccacttggccgtgaaacacttcagcgttgagggtcagcttgagttcaaagctctactgttcgtcccaagaagagcgccgtttgacatgttcgagtcccgcaaaaagaaaaacaacatcaagttgtacgtcagacgcgtatttatcatggacgactgtgaggagctcatcccggagtggctttcctttgtgaagggtgtggtagactcagaggacctgcccttgaatatttctagggaaactctccagcagaacaagatcctcaaggtcatcaggaagaacttggtgaaaaagtgcctcgagctcttcaatgaactcactgagaagaaggaggacttcaagaagttctacgagcagttcagcaagaacctgaagctgggaatccacgaggacaacgctaatcgctcaaaggtatttttacacaattttgcaactatttattttacacatctattaatatttgcatcacatatttaagatggtattcacagacatcaaattattatgcaaataataatccaatgtctgtgataaaacaaagttaatgtccttgagatggtaattgaaaaattatcattgaatcgcattccaacataattaaattcactgaaattttaattactgaataaaaataaatttattttaaatactccaattcaacttataattgtttagatcgccgaactgttgaggttcgagacaaccaagagcggagacgaactcgtgtcactcaaggagtacgttgacaggatgaagagtgaccagaagtatgtgtactacatcacgggagagtcgaagcagagcgtagcctcaagtcctttccttgagaccctgagggctcgcgactacgaagtcctgtacatgactgacccaattgatgagtacgcagttcagcagatcaaggagtttgaaggcaagaaactcaagtgctgtaccaaggagggcctggaccttgatgagggcgaggatgaaaagaagtcctttgaagcgctcaaggaagaaatggaacctctttgcaagcacatcaaggaagtgctccacgacaaggtggaaaaggtcgtgtgtggaacaaggtttaccgactctccatgcgcacttgtcaccagcgagttcggctggagcgcgaacatggagcgtatcatgaaagcacaagctctcagagactcgtccataacagtacgttgataattattaattcagcaattagaatatatagaactggaatatatatttatagttgtaggtatttacagtgatacttatgatagttaaattgataattatgatatttacattgataattaaaaaattaagatgatgaaattaccatgcaccactcctaacaaatgatgtggagacattgaatatactgattaaattctatgtattggtcactaattattaatttagagctacatgctgagcaagaagatcatggagattaacccgagacatagcatcatgaaggagctcaaaactagagctgcaaacgacaaaacagataaaaccgtcaaggacctagtctggcttctctacgacacagcgctcttaacctcagggtttaacctcgatgagcccacccagtttggaaacaggatctacaggatgatcaagctcggactctcattggacgacgaggaacacgtagaagaggactcatcaatgccgccgctggatgagcccgttgtcgactccaaaatggaggaagttgactaaagtaatatattctctgtataatacacttatatgtaacaactatatgtgttcatcggcggttttaagtctggttggtacacagctggttacgggatcggatgttatagttgaaagatatagaaattaaatgttaaaaaataattatttgatattataattataaataactagttcataattaggtgataaaatgataaaaaataaaaaatatagataatctgaaactacatagggtttgaagcagattacaagaaaaaataaagattcctgaaaacgagaactggaaaataaaatttaaaaaaattaaacctaaataaacaggaaatgcgaaaggataaataaagaaatttgctaaaatagtacatctgtggtgttagtagggcataaacagaaaaaaagggacagcacctgttagatagatatttcccatgtttcgtaaaatttaataaagcggcctagcacaagtttatttttatatacaaaaataattaaaaaccaactgctctaatatgggaaacactttagccaagcttctaaatctgcttcacgccaaaagagatgttcgaatactcatggtgggattagacgcttcaggcaaaactactatactgtataaactcaaactgggagaagttgtcactacaataccaacaattggattcaatgttgaaactgtagaatacagaaacctgtcattaaatgtttgggatgttggaggccaagataaagtaagtttcaacaaaactaataaaaataaaataaataaaacccattcctaatcatttccatagattcgtcccctttggaaacattattacacaaattcgcaagctgtaattttcgtcgtagattgtaacgacagagaacgtataccagatgcaaaggatgaactacataaaatgatgaatgaagatgaactgagaggagcagtcctcctaatttatgcaaacaaacaagacctccccaacgcaattagtcccaccgagctctcgtcattactagctctagaacatttcagggataggaagtggtaagtatacactctagatgctctctgatcacaattaacttttaggtatattcaagcttcatgtgctaccgcgggtacaggcctttatgagggtatggactggctaacatcagaattaaaaaacaaaccatgaatttgttatttcccctatgtttttaaaaatcattttcatacaatttatgtacattatctatgcaaattcctttattaaaaattggaatcagctccataagttgcctctcgtgagaaactacatccttgtaaaaaaaaagttatttaatagagaaaatgatccttctaagagtaatccaccatttttaaaatataacataaacactggcctcataaatacttcatcagccctaaattatgtaatagatcaaagtgacaacagagcacagttatttgacctacacacaactctctttaaagactctcagagcctcaaacacctaaatgcaggcctaacattatttataaatgatattcttgaggcttattcactgtatttttttgaattagtgccatcactgtacctcggtacggagctaggaaaacaccttgaagtgtttctggagcaatttcaggagaagctcatcgaattgttcaagatatcaacgttttcaatcatagaagcgtcacccaggagcaaagttgcactaattctgaactccatagagctcagattgatactggagaaggtcaaacaactgtgtaaattatttaacaatgattataaattcgtgaaagttgagctggaaatcgaatcaatgaatgatgaacggttgaaaaaaatagcactttggtcagttgttcactctgaagcgttcaaaaaggggttggtaattctgactaaggcaatattgatgacaacattgaacaaccttttcgtgcctctagtctttaatttcgtctataaaattataccatcaggtttcccaggacattttctcttacaatacctgtttaaatcattgaaggtttcatttgtataaccaaattaaataaggaaggcttgattaatcgcacattgaccagtttagaaattactgtattaataattgtaatctagttgatattttaattgaaattgggattatataacttgaataaattagactaactgatcgattaggctttatattttgtaattttgtttagaaatagtgtatattgttaaggatttaaattttaatttatgattggtataattgtagttaaatgagacgaaaaagagctatataataactgtgtaaaattgaattaatatataaattgtgttctacattgttttaaaatacatattgattaaagcggatccccattatgtaaaataaatatggtcacttatttgtattttttatttttaaaatggataataatgacagttttagacaaacactggcaactgatggtcctcagaggacagttacacagttactaccgatagaacctgaggtggttgattttttagtcaggctacatgacaatttgtaccggaaaaacgcagaagcactcaaaaatttatacgaacaagaactgaatgtgataactgataaatatttcaagtcctcaaggtggccttccatatcagatgtggcaggattctatagccaatcgggaagattccacaacttgataatggccttatatgcagaaatatactatcgtcacgccttttatctaggagaagccagttacgaggatagagtggattcctggaacaaatatgtgaggcttttgacatactttatagaagaatgtaataagcccgaaggaagcgagggattgtgagtttttaatagtttaaataatttgattattgacttaaattactaaaatgattataggagtggactgacaatcccatcatcatgggtttgggatatgttggatgagtttgtatatcagctccaggaaagctgtcactggaaaatcagattttgttcatctactggttagttcattcagaaactaaatccatataggtagcattggatatgatactacggatacaaagtctgaaattgagcagaggatcaaagaaactgtgggtatctggtgtgttccagtagctctcgagctcttacacgagttggcaaacaatccaatgttcaaatctgcctgtcagtcttcaaaggtatattttatccgctattttgtattatttcgtaaaaattttttaaaatttttgtattaattatgttttaggatgtgcatttggatacaacaagtctgaactaccaactcggatatttcgcatcaatttgcttattgagacttcatgtgttacttggagactattatacttcactgacaatggcctcaaacgtggatttatcccccagaagtttgtattggaagattccagcctgcaatgtcacactcatctactacctggggttcgcgttcatgatgctaaggtattaccaattattccaataataatgtgcaggaggtacaacgatgctattcgaatcctctcacagttactgatattcctgacgaaacaaagaagttatctcgtctcacaaagctaccaacaaagtgccatgagtaagcaaactgagaagatgtacctcatcatcatactatgccatgttacaaccaggataaaacttgatgaaacagtaattcaaacaatcaaggagcagtattccaacaaattctaccagtaagttcatttattaaattgatataattaatgttttaatacgtttatactgtgttaataatattttcaggttacaagtggacaatgaggattcatttcgcgatgtgttccacaaggcatgtccgaagtttattgacccagcaggtccaagtcttaaactaactgagtcacccaccgtaaacgagccacttcagagacaggttcagatattcctcgaggagattaataagcagaggaaagtgaacgagatttattcctacgcaaaactgtaccataatattagtttaaagaaactgggtgttctcatgaacgctggtgatgacccggaggtactccgctcccagattctgtgtgcaaagcaccatgtgagacagttcgtctcaaactcattctcactctatcacacgaaccttcttcagaccttcggggacagagatgacctgtacattgaccagaatgttcttcacattaagagtaaaaagaaccaaaagatatacgcggaatactttctccagcaaattaacaaatgtaaacaaacactcaataaccttcagtctaaaagggacgaccaacagaataagaaggagaaggttaatgtagtatcacaataataatgtatttttcacacctatatataataactgttaaattgtaaattttaaaaattcaagattttcaaaatttcacaattcgaaagctcgaggagacacgaatgggtccggattcccttaaaaaaatccagaatcctttcatgatttgactctatatttaagattcctgatttacttatcaaaacgggcttaactagttccgttataactttattgattttggtatcacaggcaacgtgtgtatggtcttataaagctagttttaaggtgtctagccagatccattagctcagtggttagagcgttggtcttatgagccaaatgtcgtgggttcgagccccacatggatcattttaaaaatgagcttttagtatttattttataaaaacatataagataaaattcatattaaaatataatataaaattcatattttgaagaaactagtaaaatgaccgaggaatcaccttcggtcagtcttgcccaatgtgcgtttacccgagaacatgtgtttaggtttcttggatattattgacctgtcattcatcctatatgtaccctttggaagcttaagtctctgttttggcttctcaaacttcttaggcatagcaggtttctcacgttgtctcgatttagccaactgcagtttctcaaccatctcatcacgatcagttttaattttattggccctaatgctgtcaattggcatgtcattaagcctcttaagtctcctttccttggcctccttcctcacttttttgagtttaatagtttcgttaagcacaggtgctctatgtttcttctttaagctcttttcatatttctttttcctaattactgaattgagtaacttctccttctcgactagaatatcccactggatctgaagaaaatgttattgaacttttattcaaattttattgaaatatcaacgaatatttaagtaatatttaagggaaatctaagtaaatttaacttacatcttgttctgtcgtttgaagttgctggaggaggagctcctcctcacgttcgagcatctttatcttctcctcaattcctggaaacgcgaaatccaccacgttcctgccattgtaaatttctggaacttcatcgtatttccactcctcgtttgccaaaatgtggttttctaaaaacatttaaacttaattaacttactccttaggtctaccgagtaaacacctgctccaccaaacttttcttccaaatccttctccgtcacgaccttttcatctgagcttttaggggtaggctcaactggcggtctatctacgctaggttcgacgtttgtaacgtaatttattttctcgagtttttcaatgctggcattttggatcttggtgtttaagcgtgcttggaggagtaatttacaagcctcaattttagcttcttcaactccttcacctgttaaagcagatgtacaaacccatttataatcggccaattcagccaatgcttctctattgaatggaaccaggtcgattttgttaaccactatgagtattggtctgtcttgaaatagcggctttattgatttgaaaagtgaaatctggtcagctattgagtacccacaactctcagatacatcaataaaaaataaagctgtgcagtaaatatgtgccagcgcagttatagctgtcatttcaatggtatttctctggtccaacggatggtctagtaaccctggggtatcaataacttgccatctgagatagttatagtcgaagtggccaacatatagggactttgttgtgaaggcataaggctgaacgtcaacatttgctttactaaccaagttcataaatgaagactttccaacgttagggtacccagttagaatgagtgttcgagtatatctaaaaattattattttaaacaaaaacttacgggttaattgatggcaatctcgacatatgctgtcttacatcctcgaggtactttaggctcccttgaagtctcttaagtgctgtgcacatgtggcccaaagcagctctctttagcattttacaccgatatagagatgatccgtacttcatttgccttacatattccttagctaatctgtcaactactctcattattgagttacactgtcccagtgctagtttatagtggtccctatcgtataaaacattgcatagatcagaataaaatgggtgaatatcctaagtgtatagttagaatttttaatatatagatttatataaattccaaataagttataaaatctaaaataattatataaataactataataagtgataaaaaatacatttaattgaggaagctgtgataaaattcgctgcaagcggtcgtgtatagtctgttggcagaatttgaccttcctcatgtaaaacttcctaattcttgagattttaaattgtttgtggacttcagtcggcgtttttcgttgagtttgcgataaaacgatgtctatcagcttagtagctgtaggtatagaggtgataccctaaatttaatcattagataaacgtattttggtgtaaaaatcttaccttaaaattataagtttgtgatttgttggccattttgtaaaatttaataatatacaaactctcatgggagatcgatgcagaaacaagggtggggaatgtattaaaatgaataaaatttaataaagttttttttaatatacctacctagcattcaggtatattataattaactttattaaatttttatttctagctaatgagtaatatttgaatattactcatttcttgaataaaattattgtaaaatatatgtacaatagttcaagtgctactgataaatatttgtagcaaattaactgtaaattatagtgttgtttttccctctattcgggttttattcacactaatgagtggacaggcccttctcgtactatattccaacatttgatcatatattttcttgaattaattaggtctaaatcacttttcctttctcgtcaaatcaatgttattttgatacattgatacaagactgatgttgttagatttaaggttcagaaaactctttacattgtacgataaccgcttggttcaccaagaactgtccaaactcaacctaacctacgatgatatcactgagttaaacgtttcaggatgccatctggatgatttatttggaatagaagtcttcaggaacctggaaaggctggatgcatccaacaataatatctccctgctagacccactggtatcattgaacctggttagcctgagaatgaacaataacagtgttgaatacctctacataaaggaacttagtaacggaatggttgttttgtcatcatttagggatgccaagtacaccgaatcattcgtgaggtcggattctgaaaataaaaaatttgatagatctcgcaggccatttaactgtcttgaattcgtcgatttaagctcaaacgagatcaaattgttcaagcatttgacgccaggagggaaactaggatttcaggttttgaacttatcaaataataacatttcaaattttaatgctctggagtatgtaaaatgttatcagaccttggacgtttcattcaaccagcatttagatttgaaacacttgaacaaatgcacattgacgaacgactgcaaagtatacttgcaatatactcgtttaaagaacgagcatttgttgccaggaatacttgacagatatgaaaacatccttgtacaccacgaaacagaagtggttcaacacgaaaggctagtaagtccatacaagctacacttggacaacgtcaagactaaaaagttcgttagcacagatgcggaatacgctgacttcatctatgagggtgaatcatctccctccgaacttttaacacccaggtacctagatactgaagacgtagtacctaatgttcattataaggagaagcctgaaaataggctttgccagctggaaacagagtcaacatatgatgacaatgagactaaattcatctcaattgcatcaatggcgagtgaaattccagaagattacgagtttgacaaatacgctagaatttcacacctggtacccacttcatcaaatgtaagaacagaaaaggaatttgaaaccgacttcaatcaattagacttcttagtttcttccatggaattatgtagaaaaattgatatgtggagtgatgacataaaaaagacactatataacgatatcaaggactaatagtttttaatttttaatttttaaacgtcgttaatatttgtatacattaatcgtttatttttaaccgttagcacgcctgttgctctcttacacatttttatataacccgaccccttagatcattgtctactctcatttcgaattcacatgttaaacatgtgctacttttaacattcaaaattttaaaatcgtctctctaatttgttataacccgccttcatcacaaaacaatggtcgattacgtaaaattcaaaaattctacacccgcctcctcaaaacaaaaggtaatactcatataaaagtagtttaggacaatttataaattatttaaaatataataaaacatattatatttaatatttttgtatttctgttgaaatccattcctgtccactacacattacacctactatacccttacacattcatttttagaaatacaatggatctcgatataaagattatctgttcggatccatcgagtcaatggacatggaatgggctgacaaaatagtcgattttaacccagacctaaaaatggataccaaccccttcacgaaatacgttgatagaaatacttccatgagcacagattgtggcttggatttcagctcaagtttaaattcaaactcagataaggagccatgcttatcagatttggcaaacggagtaaatacaggttttgactccaaaccaacccaaaacaaagctcattttgacttctccagtgttcaaaacaagactaacacttttcaccagaaatcaaaccaatctccaacaagcactaattcattttctcaaacacctacaaacaagaataaagatagggtttatctaagtccatcacagtataagaagttccaggagatccaaacgaaatatgatgagttagcctcagacttcgctaaactaaaacaggaacatgaagctaacttgaaggatgcagagtcgttccgagcctgtaaggagaaattaaatactcctaaacaagaactgggatcagatatggattccagtgaaaagctggagcttctgttggaccatatttatgcaatcatgagtgactccttcggatcagacaacactctggtcttttacctcgagaaattcgcagacctttacgtaaattatcaaaaccaagtaaagttggaacttgcatctctgaggagcaagagtgaggtggttgataatttggacaagttggtctccgacaaggctaagtacgacaagcttctagaacagaaggataacacaatcgaatccttggttgaagagcttaaaaatctgaaggcagaagacaccttggagcttaataagctcaaagaagagcttgaaaacgcaacagacgagcttaacaagatggtccaagagaactctaaaatgcaagaggaccaccgctcacaactggatatgctaaatgatgcacttaaaaactccaagtctgagtatgccaaacttctccttgaccagaaccagatattatcgcaattgcccctcttgagtttggaagtttcaattaatgggaagagtaacatggaacacacccaggaactcctcgattcgctctctaactttaaacctgatttctctaaatccaattcagacctccccttttggccagcttcagacccgaataatagtcttgggctgagtgatttttcgaacaatacctcgaaatctaaaggcttcgataattttaaattcctccagtctatggttcagtctctccacaagaagcatgaggaggctgttgaagttatatcacagaaggatgccattatccgtgagcagcaggataaaatatgtaagcttcaaaattctgttaaggaatgggagtcagatgcagtgctatggctcgactacgttgaccagtcaagttcagttttgaaccttgtgaactaagttttacacttggtccagttagatgctctaatttcattttaaattaacatatactgtatttatattaatttattttacatttttacacattatggttcttcaggttacgtttcctcggacttcgcttccagtttacttagtactctagatacttttactacagttttctggagtagggccatgacctggttcattggcatcttcagctcatcacagatttgattaactgaaaaataattaaaattttacgtaaaattacctgatttatactgggatcccgcagccagaagtatgcaggattgcaaaaatgatatcttcaggttaagttttcctgtgaaatacaaatatgaaaccttgggtatcaagtctgtgacaatggtaaactcagccagctgtttcccgtatctgtccattcttccaaggtcgtgtgagttctgaaaaaaattattctcaaaaaacttactattagtgagaaaataaacttcatatcatcatctgaaacttcagggtcaacttcagtttgtgagtcactttggttatctggattccccttcactccacctcctgacagcagtgagagtatggtggtgcacttaagatgcctaaaacagcttccagaaagagctagaattctatgtttgaagtcttccttgaatggagttagccaatcttctgaagaagtgttcaagagcattattgctgagaattctcctgtacactcgttgggcacctgcctcatgtaaatagcgctaaaaccaactctagtccagaacttcactaggtctgaactaactccaaaacatgtgcctatgtagtgaatatgacccatgttttcgtaggattcctgagatggcatgtttgcctcaattttatccaggtcagagccctccgcaaggtcatctaaattcatcaagagcgtatcctgatcttcattaactgagggtattagattccggtacttgattagcctttttattgtttcagtgccgtatcccaggttctgtaaactttgtggcacagctattcttacgattcttatcccatttagctgtccgaaatcctctgtacagaaatgttgtgttattgtccatggaattaagtctcctgaaggcttagctcctctagttattgcatttttaactgcctctttacctattgacccttctagtgatacatgcagtacacacattatgcttaatccatcatcttcatcaactttttcttgatcatcatctgttagttcatccttatcattatcttggtccatgccgtttggggtagtaccattggtgagtttatgttcctcttcagggttatttttattctgttttacatacgccaggaccatgattttgtgtgctggtgcatctgagagtagcagtaaatcatctggcgagtttctgtagtgcgatgacgtaagtgtgaatgtcaacttcttcagaaactgttcagtgtatggatggtgagagaacaggagattcctgttaactaacaggaatttacacttttgaggcactatgatatctcctttacatgaatctatgccttcgtccttgaatgtgttaaggcacaatagagagttaagccatgactcaattggatcatttctagcatacctaatgggttgtttaagtgtaatttctgacaaagtatctgaggacaatgttttcttaaacttttgtatgagttttaatgaaatcgatcttcctgtaccttcatatccgcctgtcgttgaggatatgatcacaatgcccttggagctgagaacgtccactattgggagtgggattgaggctgcttcctctatgatcaggatgtcccaggagaacatctttatgaactcttccgggttttttatttctgttgatgacatgaatttaactccagagtttcttttattcaactttaggtaactagggtatccttcagtccttgtaactgtgtatcctgaatattcatcaattcccaggcacttaagtcccctttgtaaaaaatcaaacaatgttgatacattttctacattgggagccacgattaaaatgtttctaaagtccaactgaagggctgatgagagaaatagccctatagttgctgatttccctcttcctctatcactcagtattgtcacaatttttctatctgattcctcaagtattatatttaagagtgatattaggctcttcaattgactgtacgtaactgctagagttgatagtttcttcaatactaaataatcttcatgtgcaaattcctcactgttcagtttatttaatagtttattcagcttctttttagggtcctttttaacctctttagttaaacctcctttacatataggcaagatattaagctcatcgtctactaccattgtgttttttgaacttgaaagtgacaaaacaaatcttctcacaaacctaggttcaactttgtcatgcctgtatgaacacagttttgaatgtgcgtccattgtaatattgtacaaatcttccaacgattccattgttcttaggagaataaatatgattcctcctccttcaactgtttctatggttctgcacaacacgtttggtgttagtgcctcaaaatcctaaaaatctttaattttttataaaaaatacctgtaaaactaaaacactgaatgtctgacctagaaccttctgtgaatctctataatatacatatttaatatctgtagttctaagaaacagttcataaggtgactctgtagtttcgtcatatagtcctttctttgccagtttattagccagtttctgcctctttttttgatgtgaagaaacttctaatgattttttataacaccagagtacgtttggcttctttcctgagactctttggagtaggtagtggagatttgctacttgaaagcggcttttatctccaactatcagaaacaaacaccgttcatttgttgaaacacagtgttctacgagagctctgatatctccagaaaccttctttttcattttttaaggcatttaataaatattacatggaatctcaaaggtacgatttaatgataatgaaaaatcaaggaattttagtaaatatatagaaaaacataacattttataatttaataataaaaatgcgattgttaatgaaaaataaaaatattatcaaaactgaagattcctcacttcatctgtatactaccacaatatatattgttataaaatatattattaaagaattaatcaaatttacattaatatgaaatttgaattaaaaattttcaattaaatcctttttcttgttttttgagaatttttcaacttttttgatcaattcttctatgaattgtttgaactcctctaggttctttttcgatgtattgttctttattaattcttcttctctcattatatactctttcttcttacttaggtgattttcttgaaaaattttatatttatattttcttaccaattactcgcattgactctcttcctttgttacttatattaattataccaactttatacttctaaattcatttataatatttctaaaacgcaccattaattttgccttaattgatgggattcctctatccttcctttcatttttgacagatgattttgctatatcaattttctaaacaatcacatcaaattatactattaccactttaatttcatttattgagtttctgcatatggtcttcagctctttcgcgagtttctcttcctggtcactgaataataaatatatttacataaacatacacatcgagtgtaaatagactactcatgttgatatagattaatatattgactgaattaaaacaattcctcggtattttttacacggaagaaatgtcggggttagagaagaaagagagaagctgcaattccagtttagttattgtgcgatgaattctcaagtttagccaggaaaattgctgtagtaatgggaccatacactggtagttatcgagacacctccagaaggattcctctaaaaaagaagaatctaaattattctttaaatgatgatgaatatatttggagtattaagctaataagcacctcatgagtatattgatataatacaacttcctgttacaccaaattttgaaaaaaggttatgtaacagcaagaatgagtcgccatacagaggtaataactcaccaatggtagaaatactggaaaacgattctgtaattgaattagggtttatgtttctaattctcaaaacgtcacggagttcttctattgtagaaagtctcaaggatacaggattcctaaaatttatttttcatgttttatttcttaccttcttgacctatagtcagcctgtaggatagaaattataggggtacaacgaaatgccttcctatagtgttcagttccaaagaattgaacggcttgcctaaaaggttaaattataaggtgtataagtatacctgtaggcatttctcattaaatagtttctcattgttgtaaattaaattatatttaagtgaaaaattaatttaataaacaataataaaaaacaaaggtcaaacacaaattaaactgctatttacaaaaaaagtttataatacttatttacaaattatttacaattatttatgtttaaaattactgattcatgagtatgttgtaacctgccctcttaatacatcccaactgttacaccactttgacttctggaagtgttcggaggtatttttatcaatgtcatttaattctaatgattagaattacaagatttttgaggttcgcctcaaatacttattctaataaggatttagtgttctcactgttatcatcgcacgaagcattgtacaataaggttccagtcaaatctcttacagtcccaggttcgttttaacttatatttataacatttaaactgtttccaggctatgatggctattttaccgttacccctggtcattctccaatgctttcaacactaaaaccaggtgttgtttcattttcgttgaaggattccaatgaagttcataaattttttatttcgagtggcttttttgtatacagacagtaggttttaagtacactaatcaccaaatagatcagaagaatcacacacagctgaggtcatgggcgtagaagtggttcccctagaccaattggataaggaacgggctacttcagttttacaggaagttttaacagagactcagggcgactctagtcagtgggctaaggtcaaaacgttcctaacgttagttataagtaacacaaatattcataggcaagatttatgctcatcggtaattaaagcgttacagtaaattaaaccgttattaatttaaatcaccatcctggcctcagtattgttgaaatggtatcgcaatttccctaaaattttattatttatatacctattacgtaccttgatgcaaagcttggagtctgctattagtctgtaaggtctctggtaacatggttcattttcaaatctcagcattctcattaaatcgtcaatagattcctttgaaacttcaaaatctgggttaccacttttataaaatgaaatgttcttgcaagttgatacacctgacaagaacctcctcttaaacaacgttccttttgattctaggaaattatacccatttgacatgtaacttgggtatggaatctttagaactttattgggaccgtagtgtccatacgattcaaattttaaatcatctaaatctaaaaatattatcaacaatataacataccagatgtggttggaggatcggatttgaccggatcttccctctgtttaaataccaatcttgcgccctttatcattataaataatttaaaaaatatttctgacaaaaaaaattatttataaaagaagcataagaatctagttggagatgtaacatgcacacatcatgcattgcccatgattaaacggggaacaaacagacttattcctgccaaaatacatcgtcttcatcagttgctattatttggtttacattaaggtgcggagaattttcgtcatattctgtgagatgcagattctcagttgtttcctcagattctccatattcagatgattttctaataatttaataataaataacaataattaataattaataatgaacacaaacgttttgtatgttagcatgaataatcccgttgtagcaaccaataatcccagtccccccgacacatatagaactttacctacacatttataatatttaaccccaaaagttgttttttattaaatttcctgttttaattatctagaaaaattaattttatccactgttaacttttaatattctttttatccttgattttacagcattctccagtatcgtgaattaacgctctagcaacacagttaattctgttattataaaagaaattatctttataacattttttaatattcgcacaacagctctttttgcaatcttcctctttacagtttaaatcatcaactagaatatcatcctctagttcaattctgctacagacctccaactgtgatgtttttaatcctatacacaagtgtaaaatatctagattataatttcctttaatatttaaattgcttgcatctacttttatccatggaaggatgagcaacatgtagcaaattgttatttttaaacactttttgcaatccatttctgtcacttacggttaatttaaacattattttcgatgattgaatttattacaaattttgattcaaatgtgtaacaattacacattcataccatcattgttctgaattattctaattattcttcacattacattataaaaaccaacttcttttttatttaaatagatatattcttaaaatcagctagatgttatttatttcgttattttttgttataccatatctcaataacatgtaatcatattccacaaactattttaattttttttatatttttgactcattacactattttatatattacatttttttgttttgtttatattatataacttatgaatttatatcctatttttgtaacttctagtaatctatcgtcatgtcgcacttccagcatcttattcaatcttatttaaagtctaagccctcattttggcccctagttctaggtattagattaatttttaattttattttaaacattagggtttatttccgctgtttgtttgtacactgttactgtgtattctaccaggttaaagaatcgtaaaacccagaagtcaaaaaagaagtatttcattaatttataactctctgtagtcctgaaaacgacaaacttgttgtttccttgtttgcaaatcaggtacctaattttatcgattttttaaaatattcttagactattttgcgagatgactactccttgattaaggaaaacctaaaactgtttttagcaatttgttcctcaacgaaactatacttaatcgttaaggttcgtaatttgctttccagaatctttagatccctgaagaagcagtcaccaacaaagtaatggcgtcactggagagctcaggagcttttgatagtggactagctaaacatgtaagtggacatctattaaattaaaatagagagtaatgttctgccaatcatccaatggacggatttcaatggtccagcagctgcaacctgatcttcatgtcgagttgagcagtgaagacgtcgagctgatcaatagtagggtgtcaaggcagaacgtaacgacgtttgagaatatggagagtattttaaacactcaaagtgataaatgtgttaaaaattaatcttatttgtggtttaggttagtttcttgtaggatgagggagcagtgtcagctgatgatttgttaacgaccgaggttacgttaagccagtccttgctcttattaaacttgtctgctacttgtttgaaaacttcctttgttgtctcgagcacttccttcctatttttcagtgaccattcttcagtttctcccctaagtttagatgtcagacggctgtacacaaggtcatcaggatgttcttccctatccattgttgaaagtgttcctgagacgaacatcttgagagccttgtcagtaagtacttcgtgtgcctgcaacagtgcgcttgggaccttcttgtaaacctcaagtgtctccaggaagttcgggtcagcgtaggagacaagtgccacgtgtccagtcttgagaaggtatgcatgaactccgtatgcactcctggatgctctgagttgtttgtaaaggaaattccaaagcaggaagtggagtactacttggtgtgatcctgacttcttatcgctcttgtcaaagagttttcctcccacaccaacgtagttgttcctaactggcatgaccaagacttcattcttgtcaaccgtttccattaatttcttgtcgagaacttccttgacccagaccttgtcacttgacttggagtcatttttgaatgttgaggacagcttgctgtggaatgtggttgagtcatcaaggaatgagtccagtagttcagagtctcctccaaggttaacagtcaagttcttcatgctcaacaacttggttctcatctcattaagtttagactcaacctttgaccaatccttctcagccagtggaaccagagtttccttcaaaaagttgagttgtgagtaaccgttaactacctcgtcagcgtaatcagaaactgagaacttggaagccattctacgaagtgcaaacttgtgggcctggtcgagtgaaagttgtgccacgaaggacagagttcttttaacaacctccactcccttcttggagtccgagaaatcagccttcgagagcgcttcagtcacaacgtcgaccatttcattaacagtgtgcttcaaggacttggctctgacaactaggaaaccaacagatttcgtagggtcgtcataggtcgagttgttcgtttgagtgctgaagaaagtcgagaaccagagattgcccatagcgttgtcacgcttgtagctgacttcctcagatgagagcttgtcgttcttggacaacccgagaagggaagtgaaaaccttcaggtacttaagctcctcaacagtgagtgagtccactgaaacggccaagttcatgtagaacacggatcgcgactctactggatgaaccacaactgttaccgaactcttatcactgtgaagggcggttgtctcagttaagctatcagaggtcagcttgtacaactttgaagggtttgataccttgtctttcttcaactctgataagtcaacctggtggaatgagtcaaacaccttagggtcaaagtcagcctccctttcgctcttgaatttgttgtaagccttctccatctcgtcgacttgctccttcgttagctttgagactctttcccttaggtggtctgagactttcttgttgaactccttttcaaactttgaagactccactgcttccaagtgcaatgtgacccttgtgttgttgttcaacaagtgcttcttaaccaggttagacaagtatgagcacgaatcatcggagaagaccctaagcttaagctctgggaagagctgttcgaacctcaagagctcaaatgggtcctttccttcctgatatcttggcttaactaacctcaatagagccagacccctcgggtagtaccctcttctgtgttctttcatttcatatttcttttcagtgtgcttgaactctaccttgtttagggctgcctctactgccttcctgttgaaccccttggtgacgacctcagttagcgcttccaaaaccatcttctcaaaggtctttgcgttggagtcccttgttttttcagtgtacttgactcccgtgactccaaacatgaaggaaaggtactcgtaagctgggaagtattcgtcaagtcctggtccgacccttcttgttgcaaacttggatgacacgagtttgttcagtaggacactttccgagctctccaaaagcaggtatgacagtacttccaaggcgagtttgtcaactgaatcgaggtcatacttcttcgagcctttgtgtgacggattcagcacccaccccatcatgaacatgtcctcgtccttggttttggagctgaactgttccttgacgtgtttcggcttgtctctgtactcctcggtcaaagagagcttgtccaaaacctcttgagatgcagtgtgtgacagctggcctgttttgggatctggtgaaactcctacgttgtgcttcctgaggtagttgtccacgtattcaagtctcctgtaaacatcgtttggcccgtagaagtagacggaagctgtttttggcccgtaaaacgtcttgtaaaagtcttccagctccttttgggtcaattcaaccagatcttcaggattgccaccgctgtcaaacttgaaagggttggtgaacaggttgtggtagaggacgctggttccaaagtccactgggtctgagaacttcctcttcttcatttcgttgtaaaccactcccgagtaagtcacgtggcgtccatgtacattgactcccagttccttggtgtttgagttcttgtcgttttccttggtgaccttgtagtgccagccctcttgcttcaaaacgtcgtgatcttgtgggaacgaaggtctgaagaaggcgtccatcatgtagtccgcagtgtggtagtaggacttttcgttgagtgacgagaagtagaaccttgtcctgtccctgaaaaacagtgcgttgaggaacgaaacatatgccgaggccacattgtgataaaagaagttgaacgtgttgtatgttttcgttctgaccagcactgcgtgttccaatacatgtgcagctccgcggtcgttggacaggtaagttggtgcgcaaacatcaaagcacatttcttttctggagtcattggtcttaaatgagagcactgtcagtcccgtggccttgtgtgagtagtacgttcccaccatgttgaaatctgggaggaaggttgtcatcagcttgtcatatgcttcgtgttcgacctccattgcttccttgacccatttgtacttcggatcatccaggtacacgtcgaatcttggtgactcacgctttttgtgcagcggatcggcatacttgtatgattcatacgtccctagctgtccgactgttgaatggaatgagcccttggggagaaattgcttttgaacatccatgttgagtgagaaatgagtcgaatttgaattggaataagaaaatgaatgactgaatgaaatggaaggatgtgtcttaagttggttttgtaaggtaaaacattaaacggttggtgttgtgaaattggcgcagtatttaacttaaaaatgaaggcacatccgcaaaaaaattaaaaattaacgagttaagggaataaaatggcgaataaaacccaactatggattttatttgtcttaatggtgtataaagaacctaacgtaggaaagtaaaatgtgtaattaggaagaatattacacaaattaaaaaatttcaaacggacagttctgaccttgttacgacgtaaacctgatcattagggtgtataacaaggtattgctgtggggccacgatgatgaattgtttgaggtcgttgttggcgaacgggatttgatatgtcctcagtatgcctacacatatcttttgttccgatgacagatagtatttgaagagcatcccgaagtttctgccgtagaatgtcatgggcacattttccagtgttattgttcctccatttattttataattttcagtctcaagtcttccaccttctaacattgattctaccgacttgtgaactacggagtattccgactttgagttagagtgcgccagaattgagtagaacatgtcctggacgaatatacaccctgaggcgatctcgtagcttgacatgaactctccgtagttttcccaacacttgttttggacgtagtccttagatgtgacgtccacatttactatcaatgaggggtcgacatactccagacatgatgcgtgtgacacatctagtattatgttcagcgttgactttgtgtccttctcatcatccattatttcatgaactagtctgtttacaaacaacacttgtgagtcttttgataggttctctcttcttcctttatccctcgtatggtgaaaattgaatactattatacatgatgcttctcttatccctgtggaatattagtaactatttccattacctgcgttagttagatatgtaatatccatcggcgatccatccatgtacaccactttgtcacaatactcttccagtgtccacggctcctcttcctccacggactcacttggggccaggattactacattgtaactgctgtccttcagcagataactgaaaatgtttatgttctcgtaaaataccttagaaaaaccttcaaatcatatggccaaccgcacaccagtacgaactggtggttttcgaatacattttgttgtgcgtaatagtagctatgtactgaatatatacctctatacttcaccaagttttccagagatcccgactcccttatgaatgacaggtgtgacattgctgaacacaatgaaattactacacttacaatgtgatctctttttattggcgaaagagtgtggttttttaatttcatgttcttctggggtatactttgctgtagacgcgacgacaacctctgccaatgactctgcaattacgagtgcgtagcattcctcgtcattctctcctatgatgtattgaactgggttcaatacacattcgttatttgacaacactatccctatcagaaatatattcctttctgtgtacagatattttccaaattcttgaaatgtcgatcctaaatattatattacatttttaaacattatattatatttctaaatattatattatatttctaaatattatattatatttctaaatattatattatatttctaaatattatattatatttctaaataatattgtgtttatcctagtaccatatgctgatttagggaatttcattttaaagagctgaaacatcattcctcgaaacaattcatccatttgtttctgtatgttgtaaactgaaatttccactgattctgatgatgtagaggttttgttaaccgtttgaggttgttcttcattgagttgctctgcaaaattttatttaaataacctatagaaaatgaagtacctgtcaataaaaataagttacacatttcctcaacgtggactttacttctactaatattagttggtgagtggaatagcgatgaaatcagataaaacaggcctctgcagtacacactagaggaaaacattctatacttcaaatccctgttgtaaaaaacctataaagacattattaccccacttggttacatcttcaaattctgattttgacatcagtggcttgtattctgagccgtggagttgtattgataatgaaatccccagcggctttgatatgtttagagttgccataccgctaaattttgttatttctgtaaatcttacatcagaattgctcttctatcgtcgtttataatatattcattgaaatttggagagaggttggcgtccatatcgtttaccagaaccgtatgtttggagttgaagaggagctgaaaccactacgattttaataaaatacctttgatatatacgatggtgtgttgaacgttgatgagccaccaaagatgatcagttttattccagtgttctgagtcactgccatataaacagtttcatagtatttgagtgggaggggagaagctacaactacatttgaaattgaggtttggtatgtgttataaacacatttacaaaatgtcaggagttgccaatctgagattgcaccccaaaagaatatatattcttcggtgatctttcccgttcctaaaccttatctaaaaacatattttattaccaattttatgcgtgttttctgcagttgatagttttattctcttcgactgcgttgcggctattgttacacacaaaatgatgaacaatacacacaggaaacggcctgtaagtgtcaccgggctgaaatcaccgtatccaactacaattttatttagggatttctataagtaattacctgttgccatggtcgctactgagaaatatatgaaatcgaatggcttcacaaagttaatatcctttcttggtgcttccagaagaaacaatagtcccgaaaacctatcaattgtcaatcatcaattgtacgtaatcaactattaacagtcattactaaattaataataatatacgacaaaatcaatgctagaattgaggcggtgatcccgataaaaactgtataaaactccgaaatccatgtaaagcttctacttataaaatactctgtttggaaaagcctcaggaacctcaaggacccgaactaaaaatactattgttaatttatactaacgaataaaagtccgaaattgtgaatttgttttccgtcattttctaaatggtaatgtgagaccagtattataatttccgtgattgccggtgtcatcgtgaggtcaataatcccgtagaatgagaatatatatctgaaacatattggccttaaaatttttttacttaaatcttgatggatatacatataggttcataatgtacgttattccaaagatgatttggaaagctgattcgaggtaccaatattctcttggtactgcatccattctccagtgaaacaggttgtggtcattttcatccctgtcattttgtttcaatttaataaatacctatccatatatattgctgcccactcccagactgcaaaccaagatattgttatcagtaagcttgaaatgacccatattttgctgattaacactgttcttaccaaatgtagttgaaaccatgctcggaaacacttcacaaatcttttaagtttagtttctaaaaatcattgttgaactttaatctaaccctttggatactcttctgatattgatccttttacattaaacactcttcctcccattgtcatgaaggttttatctttgtatccgatatcttcagacccatatttgataaaaggcctgtcacttctcagcgtcaatgagcgataaaatgacgacttatgcaaaaaggaatgctgagaacttagtaggctacttgaataatcttcttgaagtggttccgagactaaataatgtcaacttgatgaatagttaatgccaatttagtggatgttatatcttagtgtaataaacagtaaaaaactaccttccagatctgccggttgcgataatttatcatttttattttcggatagcttttttgaggctgaatattttaaatgtgtatgagattaggagttacctatccttctacggcggtcgcttatgagtttggaggtgcgtaatcttccttttgtgctatatgatactgtaaaaaacttgtttaggaagaagataattgtattgaagtttattagtatgaaggatatgaaggttatcgaggtttgtattgcgattgagtacaagggcgagagtggcagccttatacatgttctgacggttgcgaagatgataaaaactgttattaatgctcctgcaagctcatctacaatacctataaacttgaaatagttggaagatatcatacaaatgtatataaatgaagtttatgtgaattacggatggggtcctggatgtgcatcaaattaaagcaattaatttatatgtagtcttttatagtcgccggaggcttcatctgacgtgttactgttaactactgctgatacattgttccattccttttgattgatcatttgtttatataacctgttgaaacattcctttgtactatcaataacatcttctctaaacttctgcctgaactcatccttttcattccttaacactcttcttaaggctacctctgttttattttctacatgaagaggtttatccaagttacttatttttcctatcttctgcctcagcaactcgctatcttctattttttcatatgcttccttcatcactgatgccagatttctgtaaacttctagcgttttttcaaagttcggatcagcgtatgacatgaatattatatgtccggtgtttagaaggtgtgaatacactgaataggctcccaaactcattctcacaaacgtgaatagatgtttcctactcagatagtgtactgccaatgagtttgatcccagaacttcatcgctcttgtcaaagagttttcctcccattcctacgaaattaactctcgaaggaactacaataagttcattcttatctaccgtttccattaatttcttgtcgagaacttccttaacccagaccttgtcacttgacttggagtcatttttgaaggttgatgacagcttgctgtggaatgtggttgagtcatcaaggaatgagtccagtagttcagagtctcctccaaggttaacagtcaggttcttcatgctcaataacttgcttctcatctcattgagtttagactcaacctttgaccaatccttctcagccagtggaaccagagtttccttcaaaaagttgagttgtgagtaaccgttaactacctcgtcagcgtaatcagaaactgagaacttggaagccattctacgaagtgcaaactcatttcctttttttgaaacgttggtttggtacatattcaatgcacgtttcaatatctctactcctttctttgagtttgaaaagtccgcattcatgaggacatcattcacaacatcgaccatttcattaactttgtgtttcaggcatttggctctaacaataaggtaacccaaaccatcctcaggatcatcatatgtcttgttattagtctcagttgtaaagtaggttgatattgagagtcctcccaggttcttgccaatcttatacgtcaactcctctggtgttagcttgtcagttccagactctttaagcattgctgagaacaagttaaggtatctcaggtcatctaccgtaagtgagtccattgacagggcataatccatgtacaatattccatgagaatcaatagtatgcgttagtacagtcacagtcttcccatcgttgtatagagcgttcgattcttccaacctatctgatgataatttatagaatttagttggaatggtttcctgttcacgggatatatctgaaagctcaagtgtttttagggactctgaaccatcgttaatatccatactttccctttcatttttaaacttcttatagtattcttccatttcatcaacttgttcctttgataggtgtgatagtctttcacttaactgttttgcaatttttttattgaactccttttcatattttgaagcttctactgcatgtaagtgtactgtaactctggttgcgttgttgagaatatgctttgccatgaggttaatgaagtaatttgatggattatctgagaatattcttctccgcagctccttcattagggaatcgaacctcagtaatgcaaatgggtctctgccatattgaagctgtgattgtatctgatcgattagcatcaacccctttggataactaccactgttgagttccctcatctcgaattccaccaggtttaatccagagtctattgcatctcttttgaacccttcctcctttatttttctaagtattccaaataccacctcttcgaactttttaacaatttcatctttggagttgaattttgtgttatctactcctttaagtccaaatgaaaacagtgactgcttatatccacttaagaatccatgaaccagcacctttttacctagtcctgaatctatcaatcctttatacagtacactttcaggtgttcctaataatagatactgaagaacctgaaatcctacattatctacaggatcgattttatatttatccattgacccgttgtacagtgggtctagcaaccatgagatcatcaactcgtcttctgttggatctacggagctatactctgaactcacgtgtttaggcttatctttgtattgttcgtatggtaaatttgaatctgatgagaacaggtttgcgttatggactaggttttcattatttgggtccttttgcactccaatattatatgtagtcagatagttatctacaaagtccagtctattttttacatcatatggtccatagaaatacaatgttgcagtctttggaccataatacagcttatagaaattaactagctcctggtgagttaggtccactatatcacttgggtcacctccactcacgtacttgtaactgttactgaacagattttggtaaatcaagttgtagaacagacaggaagagtctgaaaacctgttcttcatctcactatacacaactcctgagtaacctatcattcttccgtggaggttaatatctgcatcacttttatctgaggttccgtctgtgaccttgtaatgccagcattcttggtcgaatatggatttgtctttcgttatgttaggtctaaaaaacgagtccatatacacgtctcctgtctgatagaagcttttctcgttagttgatgcgaaaaggtatgatgttctatccttatatgtcatggcgttaaggaagctgttgaaccctccctggaccagcagtgagaatgggtccttcattgggtatttcggcgttccagacaaaactgagtgttctagaacatgtggagagcctttactatttagcggtggtgacggtacaatcaaatcaaaacacatttccttgccggaatcaatgtgtgatttgagtgaaaaaactgacagtccagtagatctatgtttgtaatttgttgcaacaacagctatgtctggtaaatacactgaaccaattttttcgaaagcagagtgcgtaaaatttttagattcttgaacccattcgggttcttcagcttgatcgggatatttcatagttaaaatggagtgcctgaacgttgtttctccaagagaatctggggaaaacacgttaaatagcacgtcttctacattattactgggagaacttgaatacatcctcctaacaaataaataatatctatcattaaaatgatttcgacaggaattgaggcatttggagtttgaatcaaataccgatgcgattttataatatttgaattttgataaagcatgtgtgtatgagtttcggaagaataaattacagtagagataacttaaaatactagcactagtgagagttaatatatgatgtcgtctagatagcgtacgatgattgaaaaataacattttaagtaataacaaacaaacaaacacacatatgtaatttaaaatgtgctcacaaattattatacaaagttattattttatggaaaataataacactattatttaggcatcataaaattaaacaaaattttcatcgcaaatttcttccttcctcataatatttataactttaaatgattttatttatttttattttttaatttctatgttaatctctcaatacacaaattccaattcttcacaactccatcgctgaatcacgtttaatttgggttttaagtttctaatggatctattttggtataatatcaatagaatttttaaaaatatattttttaacaaaaaattttagatttaacactttttttaacttcacaattctattatcattttaatataaatggttactccctccacatggtttctcattgcttttagtgatggttagaaaatcaaaagtggcttcgataactaatgactattattactgtatctgtagcggctcatttgttgcaaaggaccctaattacaagcctttggtttgtaagctatgctcaaaatttagccacagggagtgtacaaagtattcgggcaatcaggaggattttgagtgccttctctgcaaggtacaccttcttgacccctttaacacagttgataacttcctctggtatgagtgtatagggaacacaacatcatacttcgtagtcgacgccacaaaccttaggaagtggcgctcgctcaacaaagacatatatatggcctgcataccgctgaataaggaagttttacagcatgaatggccaaaaacattccaactaaaaataaataacgacatggtccacgtggtgaaggagcctacttgggaacataaaaggagagacaatccaattaaagtaacctacgccatgagaacaggggaaaacttaattaacataacaagcactacgtacacggaaactgaaccattatttttactggtaatgtttgtgtgcaatcaggttacggtccagaacataatagatactctgaagatgaaccacacagtcccgtatgaggaggccagagataggatatattcaattttaaatgcaaaaatagatgacgacgagattgtttgtatggaaagcacacacaaaatggatttaacctgtccagtcacactggataaaatcacaatcccgactcgaggaaggtactgccggcatattcaatgctatgacctttttggatacttaaaggttatggagagaacatcagcctttaacatgaggtggaagtgcccggaatgccacctaattgttaagccattcgacttggtcattgacacctacgttgagaagctcattactgatcttcccaatgtcaagaccatccaacttgataaggaccttaattatcgcataattttagatttaaataacggtagagcttcgactaaggcacagtctgacgatgaccagttcaataatgatgaagatatggattatgtggcggaccttgaaactacaatgaattcaacaacagacaacgttattgagctggaatcagacgaaccacccgttgatgtgatatgtataagcgatgatgatgtgactgttgaagagccggtgcctgaagtaacagaagtaccgaagcctccagcccctagaggccgaccaagaaagaataaaccagttgagaaaaacgtttacaatagttcttgcgttgaaaagaaagttaaaaagaggaaactaaagaagccttcggacatgtcagacaccatttctataaccatcgcagaccaaaccttagccgactgtgtcaacacttttaatcagcaaacattacactcattcacgaactccacaccgacctatgataatttcattttaaagcctccggtaattaaccagatgaacaaaacttaattttatcactatgcacattgtataatacttattttatcaatataaacattgtataatacttattttatcactatacatatacataatgtataataaatttagtaaaagtacgttaacaggttattttaggatgtatccaaatgagtccaaacttcttaatattatcacctaatttgtagtaaaaatcaactgggaatggaacggatgtggcataggggaatttgagattaaatgtaacggtgccatggtaaaggtcagcctcattttcatccagcctcaaactcggtttcatgtaatccactctcgaatgtaataaattactacaagaggctttagaatcgttaaaattaacttcagggttaataactcttgggaatttataaaaaattagtaaatctgatgggaaagtcctggatttacatgaaaacccaaatgagaggcttgtacctagaggtgctgggaactcataacagcaaacatcatccacattcaaggccatattcctaatgtcagcattgaaaggcttggttttaaatctagacattgcaaatgagtaggtttcatggacattattgtttaattgagaaatgtcagattgaagttcaaagggctcaggcggctcaggtttatgatcatccatgacttcacacttggcattgttaaaaatactggaaaatgggttataggggaacttcttggcgccagaagaattattaaaaatcttatgatctatgtcgttgatcaccaaatccatcctacagtccacacacttacatccgtcaccaaagtgggtaaacacatccttactagtatcaagtgcaaattcgtccacaaacaaagatgaagtcttatctaagtggtcaaaagggtaaggaattctgatttcatgtaaaattttccagttattgaggtcctttatgaaatccacagagatatcgggtttcccatcagtcccgaagttaacaaattcatcattaagcttacagtatgagtcgaatagtttcttgtcttgttctgatagtgactttacaattgaagggaacctgattttagcctccgaaaaccacaaacacttgaatagtctccacctgtcatcgtcagtatttgttaggtagctccataggagtgatacccatattgaaacgggtatggtgcaaagccttttctgtgttatgtatggagtgacatcatctgttggcacaactaattttgcgatatttttatggctgtttgaaactgaacaaaggatatcaacaatcttaggccactcactcattatgaaattaatctctccagaattcctggacttttctttaacacccttatgttctgaatcaaaagagtcgtatgaatagttgcatagtgattttaaaacagttaatagaaattccagtcctttttgtgtgtaattacactttgaaaagaactccaacacctttagcttaacatcttttctcaagcctttcagggtaaggtttgatattctcctaacagctccatccttcagtgggtatagccttgaaacgtacattagtattgagagtgagtttggcagtgtatcatcatctgttaaacagttgtacacatatgataatatgtgctgacggtctttttcattaaagttaactgtacatagagcatgtctgatgatgttgagtgccgttcttctaatctcactatggtgactatcaagtctttgcaaaagccagaaattaattctcttccagagttccgagagtggattatttgttaccaggtcaaaaaatcctatcggatcaatttgaaatgttggatactgtcttcttgtaaccccagtaactatacatgtttccagagactctctggtcatttttgtcaggttaatctcggcctcaaatttattgctcttattctcatatgaataagaccttagcttctcaagtacaagtgtagatggcttaaagtcatcagacaaatactcttcaaaaagtggttcaataattaacttataatcaggcttgtaatccagtcctgtggtgtttgcatcctcagctatgctataaactgaatcaagaggcataaataaaatcactagtcgataaatgctcaaaatagagattttattgaggacttcttctgagtggtccaaatagctacaacacagtaatgcacaatagtttaaaatgttaacaaatatgttaatcatatccgactgggtgtttttctgtttaatgtaatacagcaagaatcttaatatacaaaagagagtgtcgattgaaaatggtatcaattctattagctttgagctaattgttgagtgtacatcagttgacaggagtttacacatatgtgtatgaaatgctgcgaaatcactgtaaatcttcttgaaaatggcgatcaaattcttcattctgatgcttttaaccatttcagaagtaaatgttaagtatcccagtgacgataaaatgcacactgttttatgtaccttcttaaatacttcgaatgatgaatatagtatcgactcgacattgtatttgctctgaagcaataggtgcttaaaaatagtatccaaatacttcattaaatgtgataatgtgttaacatggtaccttattccaaggttttgtcctaaaaacatcagaaataagttaataaatccaatattggtagataattatagtacaataccttcaaatagtagcgattgagccttgttaaagtttacgccatatagtacgttggggttggtagaatcctgtgaattatcaactgagacaaaagaatcttcagattctgaggagctaacaacgctaactgagtctaagcttcctgaaatacttgatttcttgtccgactgtgacgacacatcagagagaacgtcatttttatagtctttattggaccataaatcggcagaaggcaaaagatgaatttgcgataagtcaatgatacctaaaatatcacttatatcatcaacttctaggctagaatcgtctgattgttctgtcatttattccacatcactaaatggcaaattaggccaatttatacattacaaataaaaaattaaatcaatataattttgaaaaataatacattatttattttacagattattttatttatcattggattgggttaaaacttccatgcgcccagtgtagtagcctgagaaataccaactaaataaaaccttcaatattttgtaacattgattcgggtccgaatccgaataatttaaagagttgaaaagagtttcattgggtgaattgagtgattttgatgctttatcaaactcgaggggactgacgagacatgtgcgaatggaatcactcattattttactcataacattgaaattaaaaattacacctgaagagttttcatccaattcatcttcaatattgtgaaagtcaaagatattagaggcttctgggttatgttttctaaataatactgtaacagggacgggaggagcccttgtaaaatctgaaatttctccagttttatccaaaatttcatataaattgaccaaattctctaatgctcttataaatgtagagtgagcgctacccttattttgtgataagtcaggtccgatacttttagattcttgatacgagtctgagcaactactcatatcttctgagctataatagctaaattcgacattaattacttcattgtactgttcataaaacacatctgactcggtttttaacttctgtttgtttattttaacattgctaaagtttttattaataaaatcctctaatttggttatttcctaatttgcaatatgattaaaaataacttacggatgatatttgagaagtttgcgatttctttgatgatattctggtctacagaaatatatttatttttattagtggactaaccttaaccgaatcagagagaatctcgaatgatctgttacagaagtcatcaaaagactcatgtttatccattaagaggcacaaaatttaataaatgatatcatactataaaataagggggaatagtgaaaacttgtgatttttaatggattatctgggcaaaattgataagattaaaaaattaaagcataaacatttcatttataatatagaaaatagaaccatttattttacaattatttaaattaccataatacatttctaaatatataaaaaatacacgaattaatttatttattctttagattttattaattattttcccgacatttaacatctaatcaacattaatttattaattatttttttcaataaatttaaaattttaagtcaatttaattgttaatggcatttatttgttaataatattttaattttctaaaatatggctgatcctttatttggtcaggtccctattaaccctgtgaatcatcagatgatgaacgtatctgatgagctggctgctactatcggtggtaggatggcagctggtaagaaatctaaaggcccggttcatttgagaaaggccgctgggatagtttggaacgatcctactttggaagactggcctaagaacgactatcgcatattttgtggagatttggggaatgaagttaccgatgaaatccttgccaacgcctttaaaaggtatccttcatttcagcgtgcaagggttattagggataaaaactcagggaagtctcggggttacggcttcgtttctctccttaaccctaatgaaatgcttactgctcttaaggagatgaatcacgcctttgtaggcaatcggcctattcgagttatgcgtagtaaatggaaggatagagatatagactctgaaaagaacagacaaatggcaaagaactataaggttgccagggacgacgagaagactattagaaaatttaagaaacttggtaagtctgttactgggggtaaaaggtctaacatggtctacgagccaagagtttttaaaaggcataaggtttacctcagtactggtgctactaacaagttggggaatattcctacaattgctcaaaatcacattctagataatatttaactagttcacatgtaatatactacacaagtacacatttaactaacgtcactaacttatgatggaaagctgcaaaaaattagtgtaaattgactgtaagtgttgctggagttttaacattactatgttgcctaaacacattcgggtattgaactcctggatgattttcaattagataattttccttcattttaaataagaaatccttaacttcgttcattgtgaacgggtggtctagtccgcgatcaaagtacctaacctcataggtcattaatgatatcttggctccaggcctcttccccttattataatacgctgataggattcgaaatttggctaaaaacaaaataaatcaacaataattgcgagtatttacgtaaataattaaatttattatagataattatgatttagttaaggaatcttacgtgagttgagccaatatctatccagtctttcaagtggtggagggtctaacaaacattaatatggtttgacttaccaaaaagtctagaataccacattaaaaatccgaatgaggccaatgctgcccatgtgcttccgaatatgaaaaaatttctacttgtgaattgaacttcaaaaaactgtttccagagcggagttcttgtgtaatttggaacttccaaaacccatctgggttttatgatttctctaaatgacacatttctcctcaatggctcaaataatctactcattatatattataaaacttctcttccaaccacacaatacatacaatcacaccctaaccaataattctaattaatcacaataattaataatcaatgataattccaattaattgcgaaaattaaaattttattatacattaaacaattaattgcgtcattaatattgtacatcttcatttgaaaatggttaaaagagtttgcgaacgtctcttggagctactctaaacacatatacattccctctcctcctatcaagtctgctttgcctctggaaggctcgggtgtgcatgattatgacctccctgatgtcgtccatgatctcccgcttaacttggtagaacgagtgcttgaagaagtcgacgttggtgtcaatcatggatgtgtcaacaacatccaaatccagccatagatccatcccttcatcgtcaatcgtactgctgatctttgatgtccagaatatattcttagttcttgtgtacttgccaagcgagtatcgagcactaaacttgctctttttcttgtcacgtgtcggttctaacccttcagaatcaaatttacaaagcttatctttggtatctggtgtattcccgtctgatggtgttgagacctcggaaatttggtcaagcacaaccaccctgtgattcttatcatccggtttcttagcgctcttgtagtacccatcatagattgtgaatggttcctcgacaaactccttcttgagcatctcagacattactttggggctggtgcacatttcaaagatcgaccttcccagcgaccgctccctgttatagaactctgacacatataggcactggtccatgttattgacgtacatcacaatgtggtcacagtaccctcgaattacaaagtagtcataactcctaaacttctccatcgggtagtctgggttaattaaaattatgctatccatacgtagccgttccttcctaacctcttcatttattaccaagtactcgttgctcaatactgggacaatatacctacacacaattacatgcataaacacaatgttatatacttgtataaaaatatacatatccaaaattatgtatacttattgaataactatatggaatatggtagatgaataatttgactagtgtggtacccttttttaatggctgctataatgacgtttaggaaaacccttgtcccgcatgagtggaccagaaagtggatatgcttaattcccaagttgatgaggtcctcaatgacctcgatgaacgcctcaacaatgttcgggttattgcagaccttaatagccttagggtacgcaaaagctgaaaacgctccccagtgatggccttgccagttgaaaacaaagggtaaaacataaggaggcaacttcgaaaatgaaacaatgtgcgccatctgggaacacgcctatttaacagattaatgtaaggaaacgcaatatattaataaataataatgattacctcgtagagagttaaattatatccatggatgtacagtactacatgttctggtattaaatctggatttgttgagggtcttattcttttccaaccatcagctacaatcttatgcctacacatctgttgcttattctcccactcgtcctcatctctaatcaacatcgagatttggctcttcagctgtggtttcaaaccacgcctgtgcttagaaatatcattatcattatttttaagtctcaatttgttaaataacactgaggtgctcggcttaaagagcttaagctcaactggggtctggacatcatctgggggtccataatccttacgcttgcccttaaccatcaccagcttgatattaatttcatccgggttctctgctggagggtctgtcttccttactctgtatccatcaattttaagcgagtttgttatcttgtcaacgtaaatattcatatatccttgattgtttggcctgttgatatggaactgtctcttcaacatgccaaaacaccattgaggtgttgagctcctaatcccatcaaaacttcctctcaacaagttgaacaactcacatgattccttcttagtcttctccacttctcgatactaaatatttttaatgtttatgtttataaaatttataatattaatctatctacgtgtagatatctgtgtataaggtacatctgggttgaagaaatatgtttttggcatttgtttgaagaaatatcctgaaattgagcactccgtcgatgaaactccatatcggatattgggtccttccaggtgggtgtcagttacaaatgccactctgttgtttacaaatatggagccggatcctatttcctgtgagataaatggccctactgggtacccatgccaccagtaaccttgaagacgttctccgtatatgtggtcttcgagccactctccgtatccgtgtggtaagttatttgagtcgaatttaccattatatctcatctggtgtccaaacagtggcgcatctaaattattatgtactattgcaactaaatatgtctaaaatatataaatggataattaatacctttttgggttttgcgacccctgattttcctgtgtattgagagaaagaagcggtaaaatgacctgtataagcacgtaaaaaacccacaggatccagtctcccaaattgatgtataatcgttatatctgctcattgtgatattaagtttatttgagtgctgtgatctcttgatcaggtgaaaatgctcagtgcatgataaaaagcggccgtggagtgccaagatagggacccactgtataaacatctttgtcattgcgattaggaaaatctgccctgaggcatagaagatgagaatggtccagatgaacatatcgaggtgggcgatattcctgaaaacaatcaggacgaccatggtaataaacatgaacaggtacgagacaatcactgggaagcggagcggcagactcacctgcaccttggcaagcacaagtgctgcaataacaaataccagcgatgaaatgtacgtcaccactccacgtttaatttgaatgctgattgtatagtactcgtgatattttctgaacaccacaaacggcgtcagtgccagaactgagcagaaaaagaagattgccatagcctttttataggaaattggctttctaatcccgttaaatcttctggaaaaacgcctgtagtccataaactggattgttttataaatcatcaggtccttcagcttcaacggcgatgacaattcaacgaatgactcgcctgccaaatattgactctcgtcaatatcacttgatgaggaagatgtcaaatttgacacgaattcctccgatgaattgtatacatcttcctcactagccatttcatgttcgttacattcattttcatcctggacagtttcgtaattactattaccatcaagtccattaggttgactacctgtactatttaacgtttgtgatcccaaaggatttgataaaaagtttttaaatgcatttatcgctttaaaatctgttagacggatagattttgggaaattatccgctttagatgatgaaccactggaatcatcaaagtgtttgtcctttatagatgtgtcaactggttcatctgaaatatccaaactttgtattgatctataagattcaagtgtagttggagatagtccattttgaaggctaccctttttactaattggtagggaatctacaattggtaaatccgaatatggaatcgaagactgctcggaatccatcttgtattccgaatgtttattcaaaaatttattatatagattacagtcatatttaaaatattaaatgccatcaaacaagttatcatttaaatcatttcattaaaataaactaaaacgatatacatcgattttaaaaacagaatccgtattttacacatttaaacaaaactttacatttaaaatagaacacattaaattaaaattaaaaatctaaaacctaaattaaacaattaaaatttttaattttaaattacgatttcattaactcaattttaaatttcaaattatatttttactcacccagttaatattttataaaatatttcgacgataaatttaatgtttttaaatataaatatactttatttaatctttagattcattttggaatcacccgttaacatccataccattattggatatttaaacacattactcagttatatgctgaaataaatagcttacaccattattatattattttaaaaagttcggatgtgtttattttccaaatgtgttgatatatttaaaaatcacaattgtaaatatcacaacaattggtgttgttattatgaattttttaacgatttgtagtatgaaatggtcaaaatctaatttggaaacatgcgatgatactaatatgctatctttataatccagtattaacttcctttcttttggtgtgaacatgttatacaacgtgattcctgtcgattttggtgttacttcaagtatatagaagctatccaatgtgggtattgttcttaaatctgacactttatacaacttctccacgaacttttccaaaagttcaaatatgtgtactattttcctattgacttcaggtagttttctgatgatattttctattagtatgtaaaatctttggtctacagatgttgcaaataatggcaaatctcccatcctgtcaccattactatgaactggtaaaggaataaatggtgtcatctcactgtcacttgattgaatcatatcattcgtatccctattgtatatattaaaatacttgactagatatacatattttattaaccttggtttgtccaaaataagttttttatgccttttaaatcctctaaaatatgacttcgagtgtaagaacaaccttaatttgtaaagatttggacaagagtttagaaattttatcctatatgcgcttcttttcaagggcatgaagagataataatcaacaaacaacaggaaagatttagtgtatgagtcaacatagtttatattatctcctattagttttaaatcgatactctcatcataaactgaagtgtatgacgatttggcttctaaaactatcgtcggagtattgaatattttattcaaacgagtatataaatttgagtgtgtaccgtttacatcttcgtggatatactttctcaaatgagtataaaagtcattaaacttaattttatagtacaaaggagcgaatttgggttctttaatgtaattattcctgtacaaatgtgactgataagcctctaagggtacttcattatatattacagtgttaggtgatagattcgtcaaggaaataagccaaaggtagtatgttgtgtataaattacatgaatattctccagagtattcgacattatggttaataagtttctgcctcaggcaggggaatgtagaatcctgtgcacttagtctacactctgataagtaaccatttaaaacggattcttctaacttggattcatcatcggtgtagtcaaaacattttgacttatttgtgaaaattaaaattattaaaaatttacaggaaaatttgaataccatttacgaatccattacaatgaatataagagtgattgccactaaatacttcacacattgagtttaaaatgtttgaaaatattataaaaataaatattaattcggtgttgtgatattatcaaaatttagtttcactttcccattttcctttggagctgattcatacatacgcttgatattttccaataatttttgttcagtttcaagcatttcttcttttgttaaaactccttccattgctggccttgttacatatctaaaatggttatacatttcaattgccttcttaaggtcatacgctcttgaagcttcctcttcgttttcataactcttaatgttttcttttatccatttcttcttctccacaaaccattttaacatgaacatttccatccttcggttatgttcatgtatgttaaagtcaaagttttcatcttggccctcaatagtcctggttaaatcagtctaaaacagaaatgttacaatacacacaggtacaaactagcgtttatcaagcttattaaagtatgccttaagtaatatttatttaaagctcaccactcgttgtgtagaattctccgatgttggtgttcctatattgatagtaacttctcttgccttctgatcatctgtcagctccttctcataatctattttgtactctggaattttattaatttctttaatttcgtctgaaattttaacttcgttacccattccgaagtaaaagtagttcatttcattgagtaatgccaggtgattatctctcagttttatgttaaatttactaccatcgttgggcgtttgtttatcttcatttgttgtatcaatggatgtcgttgaaaaaaacttctccttacttagtttcagaataggttttgagggtcctttccaactcttcacttggttaatgaaatctggtacgtccgggcatacaagtcttcttccgaaacaaacgccgtctatgcccgcgagcgctaacatatgtacttgctccatcgtcattataccgcccgctgcaattgttatagcattatctggtaacgcttccttgatttctaatgctcttgttgggtatagtttattttttattctatcccattgatttatctatacacacagatatatacaggtgactattagcagtgtataatgtagatgtatatatagttgagtaaaatagttaattaattaccatgaagtgattaaaccctatatctgctgatctgagcgcatcggctgtggtatgaacttcaactattgcctcaattcccatggtcacacatgcggttagtaaatcttgcaaggcattcccgagtattgctgcattcaaaataactccgtccgctctcatttccacagcttgtgctatctatatatacattcagtttaactttaaaatgatatataagatacaaacttggattggatgtagaatgatatctttcatgactattgccggtctctttgttctgcctagctttctcaagtttaagaaaactttattcaggtcgttgatatggccaccgtagttaatctggtcaacatttacaaatattacgtcaaaccctgaatattaattattaaactggttaattgaatattttcatacccactgaggccatattcatggccacttcacccgcgtcggtgtaggaaagtacgttattatcacactttgggttatgtgttggagttcttctcttcatatcagcaattacacatagtttgtggtgtgtattgttactatttctcctaagcatatcggaaagcttcaaatttgatgtacattgcaaataattcagcctcaactacaacataataaatataaagatatttacggtaaattaagtatatatacgtgcctgaagtttgtcattttggtctttatgttgttctatgagttggtctacttctgaatacttatcggtgatcattttatagaacctttcctcgggatagtatgggtttctgttatcccgagagtaaattttaaactccttaaagtcattttttccagcgcctattgatattgaatagttattacagctgtttgaagttgttttattatttatgttccgatttagtaaattatgtgtaaagcggtttgttacaaatgatgaaatatttgatttaaacaaacatacggatgcgataggatatattaaaatgattaaagcattgaaaacatcttttttgtaaattaaaataaatgcataaaggaaattaaccgataatatcatatattttttaaagaatccgtaatgtgtaaatatagtacaatggaatcactaaaatacaaagtttttaaacaaatattattgatccatataatttataattaatagttaaaacataaaaactgaatgattacataatatattgattaaaatgtgtgaataattagttatttccccatccattagtaaattgtttcctttttaaatactaactatttattttttaattggttattactaagaaataattattttaattagttataatgaattttagtttattttgatgaatctttctaatttaaacatcagttttttaaatcaactgtaaattattttaataaattgccttaaattaatggattctgttgataaaaattcagtggatttgaacccttataacggttcctatgatttgcatagagagttatttggccatgaaagaggtgttagatgtggttgcaacattgccgagaaacacttatcgctactcaattcgtcagattctccagacaaccacgccttcaatcacgagtatttggttacagggggtgcagaaggggatgtggttgtttggaaattgactagtttgggagattgtaacatagtttccaggttcatggctcatgtcaatactgttatgtgtatcatcccttcacaacttcttaatgatttcttggacatgtcagcactggagtctaatcctaactgtgaattaacactttatgaacaccaattgtgtgtttatacctgtggaagggataagctaatacatagggttaatctggcagggaagaagttactcactcttgaggttagtgacattcaaatgtagtaattaattatgtataaactataaaagctctggtttaagaaatctgatacagggccatgatgatgttgtgtgtagtttacacgaaatgcaagattcaagtaaactcgtaagtggaagttgggatggaacagctattgtttgggacgttttatcgggaactcaactctatcgcattcaatcaacacaatataaatattcaggtgccaattatacaaactttaatacgccacactactcatttgttatagcaattcatcactatatataaataataatttatgtttagtttatgtgaacagccttgcaactggcgaagtagtgactgctatgcagaatggtgatttgtgcttttggaacggaacaaacttggttaaatcaaagagtacgatatatcaacaatattaatgtttagagttacacgatgatgcaattagagcagtcagtattaaagataacttcttgacatgctctaacgactgtaccatcaagtgctttaacaactcattgcttttactcttcagtatggagttacacgaaggatttgtgtatggtaatactatagttattacaattctgtacatggcatataaaattgagcagatgtaaggcactcaaaaatgtttgatgtggcgtttacagcctcagaggataaaacagtgagagtttggagcactaaaaatgggcaactactacagacaattgcactagagtcgtcagtttggcaggttctccataatattcatatgaataatgttgataatattatcctgaatgataatattaggtggttgagactacgtataacggaatagcaacaatcgaattgagtgggaaagtaacattgtggaaattaaagccgggaaaatctcctttacagcctaataacaaattagtattttacaaaatctagaaaataatgtttaggagtgtgtagtaaggcctaaagttacccggactagtggggaaaagatacttgatatgaccctgttcaagaagtttaacagcgagaaggcccaggagttaatactcaaatactctgaagaaaacaaagtaaataaagctaaatatattgtattttagactttgctggatactgagctgctgtacgttaaacagttctttcaaaatgatacttcaagcctgagagattcgttagttttaccctattactgtatatacacacatgaataatgtgttttataacacaattttaaatcaataacaattatagtaaatgcgtagatatgatatatcatgggttgttaagatgttggactggcccgtgagtgaacggttacctgtctttgacctgatcaaggcgtcgagtgtttatttatttacggaacaattgtttaaaacaagaaaccaggggtatcttttatcatagaacgatgttttattagatctaaggtgatattctcagcaaacgaagcgcttaaaaactctgagaacccccagttgttttcagtgtgcctacaaatgttcgcaaacctcctacacccctcaatctcaagatcagtgatgttcagacattcagaatcagtaataccttataattactcataaatcgataaatgtgttaataaccattgtagataatggaatcggtttccctaataggaggaatgagtaataagttaatccagcagccgttgtcagtgttgtgccagaactttgcaattgcatgcgttcacaacaatgagtcaaatgttatcaacaacctggttcaattaattcataagtcactcctaacatgtactgaggatttaaaaaatgatacttcgtgggcagcaccagtttcagtaaggcacttcatgacccttgagctcctcatgcacaacttcacccagactactggatactgccacaacaatcagctgaagccagttttagaatctttatcgaaggttttaattgacaagaaactagttgattcaaactcagtaaacacacttaattacgtaattaataatctgaactgaattttagtggtatatagttttatatgcgctagtgtatatgcacataagtatactagatgtgatggaagtgtatatagagtaagaataaacaaaatattaactgggtagttgaaagtctaaagtatcagactgatgttttgacctaaacaatcattaatataataaagaaattacgcgtaatcaagagaattaatggagagggtaaactttatagcattatcagggtcgtcagttagagggaatttaatagtaatttcaaaggtaccaacagttctaaaggacatatattcaaaagcatcaaagatatcaaggactgaaccggtatccttacaccttatttctcttatctgagatggaattatgtcaatagtatatttattggagaattcatcaagaacttgatatatggatatgggagaacagagcctcttggaatcagaaacaaacgttctaacatcaaaattcaaatcaaactttctgaaacgactactgaataatacatattcaggtttaacatcctttgataaaacttcacccgttagtacatctcctacacatagcatggcaaaaattcataaaaaaattatttttgttgcttaataatattaataaaaaaatattgctaaattggggtaaaaataagctaaaataaatacaaacgtttagttgaatgtgtagtggaatcagaatccttattacagtaaagatcgatattgtaccagtttgcgtaagctgcgatagcatttggaaaaagatgataattggcaaaacctctagaagtagttacaatctcccctgctttgcccaaaccctcggaatccttcagtaaaacgacgtttatcttcttactatcaactcgagggtaccaagttctacgagatatagttcctcgagtgcataatatcttatttcttttaattagcaataaaaaattaaatccactaacgatgtttatattatttaccatgaaattataattgggattgaaaattacctattatttaaaattattaataagaagaaattatttatgaaatcaatgaaaattatatattattaaaatgagttaaaaactaaaaaaatacaaaaatctacccattaacactacaacatcattatcgaaatgtatcacacacatttttaattaatatcgtaacaaccattaataaaaattaaatggtttcaataagtataaaaagaacagcttgcatactaattttattttttcacattattttcctcaatttcacattacacatctgctctttatcaacatcacaaaaccaaaaatccacagtaagaaacaaaacatttgaagatttattattttttattaggaaaaagctaatttatcttcaaccaacccttattattacaaccaaccttatgatcaaggcttcaactactacaattcagctgattattctaacaatctacctaacaatttggtatttttgattcattatctatttatattagttagctttatctaattaatgatatattttatatttgaattagaccattgaggttcttcccaacgacgaagacgatgatggtattttgttcttaattaatgaatttcatcagacggttatcttaagttcggtttacttcgtgatgcttatggatatgctgattctataaatgtatttttaattatctttattcgtattaatgtcactttcagacctattgattctgttaaaatttctatacattatataaattatcgattattcaattgtaatatatttctaatggctctaaattcgattgtgtacaattgcaactacacctctaacgttaacactaaaaagaagaagtggtactctggactcttgaaggcagtctgtaaccatggttcaataagcctttctctatacgagttgaatgaatactctaacagcttcggaagactcgttgatactctcgatattttcaagtccgatttggactctcttccagggtgttatttaatcaattaaccatttttattattactaatgcatttttagacgtgagttcatcacacctcgaaacatcattgatgtaattgacgtttttcaaaagaatgaattcatgcttacaaatttcattcctcctaaacctgttatcaggactggtcttcaaaagttttcagctcccagaccctttatgaacattcgtacatctgatagtaattctcacaaaaacaatactccaaatttcagtactccaattgacaatcgcattaatactatcaaatgtgatgatgactcaatatcaaacacgggattcaatagcccatatgatattaaagctaacatgaatgagcgcatgttagttaagaaaaacattgaaaacttgaaattcgaccatacttcacctattacttctaacagtttagtagtagaggacattttgaagaacgtcgacttgaatctaaaacaaatctaattattcatatcatatattatatatattattacgactttgaattagtcaatttaagtttcttatttctacggaatttttcgaataattgaatcgggtggaatttagtaatccaaattcctctttttctttccatcttaatgtttaaagttttacaaaatcctgtaataaatccgtggaaaattaaataagacactgtgtgtggatatggctgggatggttggtgtctccaaatacttaaatcacccagttttatctcaacgcattcaacgtttttattcattttatatcggaagtctccgaagtgatcacaggttaaaaaatagtgtttgtcattcaattctacagtttcaccatgcccattaagttggaatagttttaaagatctcggaattggaaataagagggtatcccaagtcgtgttatggcggcctctcattgaaataatgaaatatttttcaaatcttacgcttgcttcataaaattcataatcataacagattgaaatgggatatggatcaccttccttgtgcttccatataagctctacatcatagaagtagatctcagtacacttcgcaccttctttaagtttatataattgtttgcacttttctggctttgtgattctacagtagttctcgtttatagggacgctattaccaaactcgtcagttgtatataattttaaaaagtgaaccttaatctttacctttacgattttgccatcattgaaacaaacgttcatatcattattgtagtctgtgaagtagattttgttaggaaatccattactattatcattattataattccagtactccttgccattatagacaaccctatataattcagttttgaacctaattgcataaaaaaaatcgtcatgtgtgacatcaaaaccatcagaagtgatttcaatatcttccatgttgtagaacttcaaccttgttatatctggtcttattgaaccaaaataatctatacaatatttgtaattatattcaagatcacgattttcagttgataaataacgtgaattacgtattgtttttttattataaatatactgaggtaaatccaaatttccataacgtggtgagcgatttaatatctttccaatataatatccttgtttagcttcgaaacccctaactgattgtgagcaatacgttacatatttgtcggtcgacattatcaaattaccgtcaacaataacactctcagcttcagtgtcaacagatttatcataataatttttataagctgaacaaatgtgttttttaaaaccgtataaacatagttgcttatgtagttgctcatctttatagacttcaacaccatgattaacattgaaatgtgatggtttataacaatcatcatttttatcagaaatacgaaaatttgttatttcaggtaattcagtctttaaattttgaaaagttagtattgactcatcagttaagtgaattgagatagttccatctttcaaattaaaagtcaatgaatatgggtggccatgtattggtttattacaatggttataaattaacctacgctgataaacgatcatttcacatcgaatttcaaatacgatttttagattaaacaactgcaaatcgtagtaaaacatacctatgcataaatcatttccatttttttggaacatttgtaatttgttcaaatcgactttagtttttatattaatccaagaaccatcagaagatttgtgtaaaagaattaaattcccttcataaggaactattacaatatacttatcatcaccatcgtaaaataatactagatgtgaacaatcattcttgttacaagattcccaaataacaaagtcaccctgttgtattttatttacataattcccggtacataaagcatattctttataatcatttctgctaaaatatgaatatttgtcacttttgtcttcattgttaatatccaagactattatgtctgaaacatctggaggatccaaaatttttttcttatcataaagagttaatttagataaattataattaatctttgacattataaaaattaaaagttaattatacaattaaaacatataatggttttcatttatagatctattatatatactcttaatatagcacttatcaactgttttgtatattatctgatttaatatacacatttatccaattttagtttaacaataaaattattcaattatgtaatatgaacaattattttattgattgatatattgatttctatcttaatatgtgtgatacacaattatttagatatattaactattttatagtaaatattctaaaatggagttaatatttgaatgtgattaatatgagaaaacatttcaaagagtagttattgctcttgaacctttttgaaactataatttacttcgcggtgattctacctgcaaatttataattgagtccttgtggttgaacatacgttaactgtaatataaaaagaaaattattttaataatatataacacatattaagaatccgaagaaatgagagaaaaattaaactctgacactatcgtatcctatcctgggctaggtaattggatatggaatggtttaaaaactctttggagtttagataatcgaataaatatgcataaggtgtgaaacgtgagttatattgtagggttgttagaacgtctactgagaaactcccttatttcattcaccttttggtatactttatggtcagtagaatatcgtaaatagaaacacgtctcacttatgggaacgatggaagtgttttggttggttagatcgagatcatcacagtcaacttcaaccggaaacatgtcggggttgattgtgagaattcggctattacagtcgaattctaattcagctagtttccgatcttccttacccaagagacacatcttgtcaaaaattttgataccattggtttcatttgatggaagaaatcgatacttaaacttaccgaatggataacaatcaatgtcatggtccaaaaaagatgtctcataaggtgcaagtagaaggtgtctacggtaaatctcatcctcaggcaattgattcaataatgggtaaatgcactcagcgacttcgatgggagtcgtgacaacccgtaaatcctcgataaattcttcccttggtgatgagtaatccgcaagtgatggtggggctcctccaatgtttttctcacgaaccatttcattgtaaactggagatccatatgattcagcagttttttggtctggaaatgagaagaacttgataaaagaggggtattcgagagtttttcgttcccaagaattcccttgttttcgcaataaagtgacctttgccgagtagtaaagtaaaaagccctcatcattgaattcaagcctaagtggataatcaagaccgtcatggcgatgaacaacttcacctctccacttaaacagctctaagttcgaacctggccaaaggttgcaaatgaatctacggtctttaatataggaactgaggaaatcatcaggaaccttaatttgattgccattggaatcataagttatcggttcaagccttgagctaacataataaagaagctgtgaacactgttcatcgtcatatggcttagattctaaatacgacgcgtaaagaaaatccaatccatcggtaggtattacaattcgaggcattacacaaccaaggtcgtcctcgataaacatttttagtccgtaatagataaggctaaggtatagaagaaatgaaagtcagttaagctataaatatatcgtgattactaggttgacaatgtgataagaatcaaaagcggaatgctatggtgatatagtgccgagagatctaatgtaaatttcggaattaagatgtctctgtaaatgttaatataaagtgtgaaatggataataaagtaaattatgaaataaattatagaaataattaaaagatggactgtgtaaattaaagtatggaagtaaagttacgtcaaatggattgtgaacatataatacaacttgataagagagtaagatttattagatctatggatccgtagaaattatacttaataataaggataaattggacgatgtaaaggtcgagataatgaacatacgattgatattatggatcttataaaaatatgaaaaaacttggtcaatatgttttaacaaacgaaataaattttttggggaaaattttataaaaaaaggacagtaaaaaaataagagaattaatacagtaaatgtgtttactgatccgaatctcgaaatattgtgcccaacacttgattgtgcaaagggtgcaacggcattgttgtatttcaaaagtttttaggcccattttcttataatcactctaaaaaaacaacagtataaacaattataaattaactctgtaacatggaaatgtgaaaaaacattaattattaacatatacatatacacatatcatataatatctacattcaacacataatttacatatatcataaccttccattcttttttatattaatttacttaatattatttttaaatttctaattttaatttaaatgttttaaaatgtcttacgttatattaaatttaggaataaaattcacaacatcgtaactgaaaatttacaaacattattaaatatacacacagatatatcttcttagttttttcatcaatataaatatataactaaatttaaatctaatttttatttttaaaacccactattgaatccatataatatattaatattattcctttatctaaaatcatagcacttaagactataatatataaaattggataagatattaacgacggaacttttttctaatatctgtcacttcccttaagtaagtcttccaaatccctttttttctttcacacctaattgataaattactacacaaacctgtaactaatggcatacaggtgtaataagtcattgtgtacggatattgttctgactgcttgcgtttataaattgttacatcgtcaaatttaatctcatcacattcatcacattctttaatattatatttaattgatccaaagtgcgaacacgttaaatcatagtgtttctcatttaattctagattttcaccattctcattgagttggaatagtttgaaatgttttggaatataatataccatcggaatccaaatcttgttacaacgtcctctcaatgaaacaataaaatatgtctcaaattttaaacttatcgaaaacatataattatcataggtaaatgaagagggataagggtcaccatgtttatgcttccaagcgagctcatattcgtaatgccaaatctcagtacacttaacaccttccttaaatttatacatacgttggtccttgaaaggtttttttattctgtactgattgtcatcaatttgaaccctattaccaaactcgtcagttgtatataattttaaaaagtgaaccttaatctttactttttgaattttgccatcattgaaacaaacgttcatatcattattgtagtctgtgaagtagattttgttaggaaatccattgcttttatcattattataattccagtactccttgccattatagacaaccctatataattcagttttgaacctaattgcataaaaaaaatcgtcatatgaaacatcacaatcatcagaggatatttcaatatcttccatgttgtagaatttgaacttcgttatatctggcctcattttacctaaataatcagtgttatatctgggattatattcaagatcacgattttcggttaattgataaaatgaacgagtagcatttatttgtaaatcataataaccttgataaaatgtatcatatgaaatttcggggccgttttccacttttgcgaatataaatccttttttaatgttaaaatccctataacctcctgagcaatatgttacatatttatctgtggacattatcatattggaatcaacaaaaacatggatagcgttaacgtcaaatgtatcatcatagaaattacactcatatatgcagatatattttggtttaccctcatctaattttagtttcttaacaaccttttcatctttacagtctttcaattcacgtttaaaagtaaaatgtgatgtgttgtaacaatcataaccttgataaaggttaatagaattggtttttacatgcatttgagccttgggacagggaatagtcattattgagtcattagatagatgaattgataaagttgaatctaataaattgaaacacaaagaataaaggtgaccatacataggattatcgcaatggtcatatattaaactcccggaataaacaacgatttcacaataagtatcaaataaaatttgtagattactccttttaagatcgtagtaaaaataatctggatttaaataaaatccattggttccgtacacatgcaatttgttcaaatcgacttcagtttttatattaatccaagaaccatcacaagatttgtgtaaaagaattaaattcccttcataaggaacgattactatatacttatcatcaccatcgtagaataatactagatgtgaacaatcattcttgttacaagattcccaaataacaaagtcaccctgttgtattttatttacataattcccggtacataaagcatattctttataatcatttctgctaaaatatgaatatttgtcacttttgtcttcattgttaatatccaagactattagttctgaaaattgtggatcattcaaaattttattgtcatcatactcagttaatttacataaattataattaatctttgacattataaaatttaatgttaattatataattaaaacatataatggttttcatttatagatctattaaatatactcttaatatagtacatacaagttgtttcatgatcatattttgtattaacactttttaatgtattaatttattattcaacttattactgtgatataatgtgatcctgtatcttattgaatgatattttttgaattaaatgtttaactaaagttttaaacacataacgagttatatgaattattttaatgttaatatattgtaacgacattaattgtattggaggttgaatcgtatgaaataacgtctttaacaccgtcgatattggtacctgaatatgtgtcaacactactgttcagataccacagtttactattgtacatttacggctaagtccatgagttttaacaaaagaatccgaactagaatcacccaaacatatctaaatcgacatttgtatgactgaaaattatatgcgattgctaattacggaatttgaacttaccagatcaggtaaagggtgtaggagtaaacttgaatcatgacttagtacagttgatagaccaggcttattaggcaataaatgactctgaccaactattgtctcaaccaactacaataataaaaatgaatttgaaaaattaccatatctgagaggtctttactgttggctgaataatttgaagtcgtaataattgagtcgaggagaagatgactcaggatatcatgcctgaaaaagatcatccttctgccccaatgccttattctacacgggttagtggccattataacacgtcctttacactcaggcctagaactttccaacctctctacaaacatcaacatatttaaagaatttaaccgttttctgctatataaaatgatatataaccgtgttttgtgtacaactaagaaataatacctttgaaacggttggtagcaaaacttaagagtggatttcttggaactcgttctgtacaaattgggtaaacttattgacatacgtctacacaaagtagcgtccttaggccccggaacgaaaaccatgtaacagcctgaacaatacaagttaagtcatataatttaaattttaataagttcaatgtgtaaaaatgtacttgccaagatcattatgaatttgggtttagtgagtactttgaaaagtgcctcgaatcctgatgagtacgattcgtacgagtttgtatttgacttaagttcaaaagtgtctgtccagttgcgatagtgatcgaagttatactcagatgagttgaagtttcccataaatatgaagccggctggtaactgttgctttgaataattatccatcaacgctatattaaaattaatgtaatcctaagaagttaatttaaaaactatttaactctatattatttaaaatacaattgaaaagtcgttcaatttgtttaatattatctgaattgtccagatgtaggtcggtaatgacaagccaattagaggacatattctttatagataaaatattcggtaattcattgaaggttacctacacgttatagtatttaaataatgttattattttttaaacacaccagctccattggattatgattgccaccgaacaggtttaggtgagaaacatcatctttacgtgtgagtggagggtgtgtcaagcctcttacttcaaatacattctgattaatatttataataagttaaaattacctccaagggtatcatcacaccgtatattataacaacttgcccataacagtatattccagtagttattttagactaaaattaatttttcaaaacttgataacaaaaccataatatataaaatttcataaaataactctataaatcattgtatatcatacttcaggtgcgattttaatttttaactcaactaaggagccttgaatacaaagatcaccgtatttagacttggataagttcccaatcaacaattgaacacctaaacataacttaaaacttaatcatactaataacacgtaatagaatagttaaaaaataaccttcagaactgaacgatactgaatcgacgctaactgccataagataagaatgcgattcaatcccaatccattcattaaaattatatccccggcacctctagaatgttattataaactccataagccactatttatacttacaaacctccagtaatagctgatagcgtactgaacagatttggtcgattggatctgcatgtgtttccttatcgtaatcatcgctattgaatgaagaaagaaatttctataaacggaattaatatatgtaaaatacctgcttttttgtagaataatacactttaggaacgtctttaaatgcgttatatatataaactccgttattattgaacttattcacgaaagtattctcgagtacgtatgggaatttattattaatcagttgaataaaattattttgtgcgatgtacaattcagaatttgtaatctcattgattatagaatcgatttcctgagtctctattgacgataatttagtgttataaaggctcaacactaggtgattccataccctggaatcaacatacacatcttcaccaaattgtactaaaaaataatcaaaaattcaaatgaaaaatactaaatttttatgagtcaaaattaaatcataaattaattaataatatagaatttgttacttgaatagaatgtcggagaaactgaaatgattttgtcagagagatgctgtaaaatgtcttcagaaactcgtaagctaattccatatttaattaaatttgaaacgattaaatgtgcgtttgtcttcctggaaacgaagtctacatgcggctggtgatcaccaacttcatcgtatattattggagagtcttcatactgggtaaacaagacttccataacgattatttatataaattaaaaaaatgatatggaattaaaaataatcactaaattcaatacattacacccaataatacatatgatacacataacatgtattaactggtaaaagtaaggaatattgacaaaattaaaaaactagttaacaagtgatttgatataatttttaacagtttccaaaagctccaaattatcatgtgagtacttttccaccaacctggtcaacgaatcaacatcatggtatattatctttattgctgatttcgggagcctattatccctgcttttatattttattatgtagaagattgtcttgataaaggcgtcaaagaagttgttgtatgcgaactggatataatactgcggtattttatcaatgaagaggaagatgctctctgggaacttttccacaatatcttgaatcctgtatccgttactgacttctggcgtgtataggttatagaaaatatgatgtttgaaatccaccagtaccattttccacataactaccgtgatggtgtccatgatcagctgcttggattcacgcttaaggatcctctgtgacgcgaagatgagtgatgacagtgactttgagtgtgggatttcaagcaattggtgtggctcaatgaagaaaaaccggtccacattcgagaccactgaagttcctatagcgttatgcacatacgaatactccgggtccctctgcctaatctggttatagtagaatccgaatatatcctcaggcaccttaattaggttatttgagaggtaatccatgtttgcaatgcgtgtaaggtcctcaagtacggacttcgatttaaagttgttactgtacttatcaatcaggctaacaatgcttgagaatgaggaatttttaggtgacttggctccaattgtgttcttcagcctcttccacaatgtcttcttagttttcttttcatcttctcccacctcagctccagctccaagtcctattacatattgaaaatattaatactaccagtttctatatatcattaaatactaaagtatgggggtttaattgatcttgtggtatatattaaatgtataaaggttatacctgatgggatcccttcgatgatgttggcatgtatattgtagagattactgagtttgtagaacttcagaagcgccttattgtaacacctgagcgagttttcgcatgcgcttgtgaacggcagtatgagccattcaactgggggtgagaggtgaaacgacgccttcagagatgcgttaagcaccgtgaccaagtttactacaccttgggtgtacatgttcgcactgctaattctcttccactcctcgttatccacagaagaatctaccatgtctgacattgaaacgaacttgtgttctagagccctgctcaggttatcctttatgagttttaagaactcgacgtatccactcaccctatggttagagtttttgtagcagaagaacatgcagttcaatagcctctgctcctgctggactgggtcacttacgggtgccctcactatataactagagtcgaattctcgctgtaacaccatcagctttctgaactccggcattaccatctcattattaattttaaggttctcatacagtgttttgtagtgcaatatgctgcagtttgagaggagagacgcgaactctccgaaatggaggaagccgttccagatattactcgatactgtgcactggtacctcaacatctgcagcatctcctcggtaatcaggggaatcaagccgttattgtccagcgatggatcactcgtttcccttacacgttccacgcactcattaacgaatatctttgaattttgattcacgatgtatctacaacattttatcaacactatttatagtgatgctatatgatgccaagtgtctatcaacataaatatacttatatatatagttgttatgggaaaaaggatctaacctgaaaatgttaaccatattgcagcatgacttgtcagtatcatcatctgattcaaacagtgaaaggttgggaatatgatctgacagccttgggtagagagctctgaacaggatcacgaaaactgaaaggacgtagaagagtccgtcggattctacgaatcgtgagaactcacacaagcacttgaacaactcattcttaaagttcacacaggccaacctcagggataatattgtcattacggtcctctctattgaggatggtgtcagtagggaatagtcataattgtactttacatcaactgaacctctatttacagagtttgacgatccgactacagagtaggttgatttggccgatgatgggccaatcttagctccactactaattatgttaggagcatcattgcctgatataattgcaaagagagttggggactgataattaatcaactgcgagattataaagtggaccttagtgtatgggtcatttgaatccatcgtcttcatctgtgttagtactgactttgagaggtcattaatactggacagagtaatgagctcaatgcagcttttatcatgaaacgtgtagttggggagcaaatcctctggagtaaagtttcctcctattttatatttgaatatgtcaaaaagaagatatgaatccagttcagacaatccaactggcaaatagtgcacatttgtgggcatctgcaacagtatatacaactgcttagcaacactttctgttatcttaaacttcaacctcgccattgctcttaaccgttcttttattcctgtgcttgatagtctaagcctcttgaaaatctcggattcatcatctaaattggtggtttgtgtagtgtattctactgagggatctcttgttgctggagaggtgactccctccagagaatctggatctgacggtgtattaattttataaaaccacagtgatgaagcggccatgattgcgtgtgagataagagggatttggtttttaaagttgctgttttcattgtccgtaacagtgtgcttgaggaggttaaagttgggcaaaatcccagtctgcataaaggaagaaaggtatagaatgatttgaaagcgctgcgggaagtctgacattgcaatatcatcacagctcaagtacttgtgaagataactgcagattaagagcaccaccggctcctcaatgctaaaactctttgataacactacttcatctactcgatgattaaagtacttgttccattcattattcgtcttcaaatctccttctactgacttcatggccttcatttcctctttccttcttgctttataagataatttagggttgttctgggaggtgttaagaattgttttactggctgatgtcatgcatctttggaaacacgtagttttgttacttctgacttcagcgagcatagaaatgttatgatcgtcgtagaagctcaggttgattgcgaaatcttcttgtttaagttgtttcattggggtttcatcttctggcaaattaaaatgtgatttaaactcctcatccaaatcctcaaccagcaccaacttcctcaagagttccagcaacttagtcttgatctgactaccattgtccttactttgttccaaattattaagcagacccgttcttggcgaatcaaccgaccttgatttatccattttacttactgcatactgttttagtgtgttcaatatacctaatgaacccaataactccttcaatatcgaatttcctattttatcaattagtggcatatctttaaatttaaagccgtgtaacaactcttcttgtggtgttgttgagttaatacaccttagccatctatctttcaaatccgtgcagtggtttggtattaggtatatcactctcgagagcttctgcaggagtgttatgtgtacgaaatggagttgtctatacatccattggtaaaactcctttatcacaaataacttttcactatggatgacaatatctccctttgaaaatgagtcaatcagtagtaaaattctatatcttgtgtccatgacatgcaacttaatggccggtgagtgtgctgtgaacgagtctctaggtttcaaaactacgtccaggatgccatactcaaagtctgacactgacgtcctaaacctatacgtctctatggtcttcctcagtttaattaggacttgctccaacaggcctaaatttgctaacaaatactctctcaactctcccgattctttgttcaagcatgggtgattaataaatgcagacacgtactggtgcagtagtattaacatttcaagggaaaatattgtccattggtcttcgttcatataattatcgtatagtgaatatggtaacgttcgtaggacagctctatctgacaactcaacgaatccatcttccgacctgggacttttaacggatttaggtgaatctgactttttaatttttttcgaaagtttgtcataatcgataatcgggtacgaattgtagtcttccaccaattttactatgtcacttatatcatcacttagccaatcaaattgtgactccagccttctttctctgcatttattaaacagggacaacatatgttcatctaatctacgtcgtgttattctcaatatacgtttaggatctcctattactcctggatttatatgtttaaacttttcttccttattttctgttttgggtgaatcaaatccctcatcagtgggtttactatcttcatttctatactgttgttgcccaacttcttcagctggttcttcttccttatcaccttgattctcttcaacttgtgattcaagtacttcggttttagattctttatgagctgcaacactgtttcgttccacgtggtcgataaaactaccatactcatcagaatcgagataatttgactctaatctaagcagcttcatattctgcctaggttcagggtccttagtttcatcagcattaaccaatttaccattgtttctatccgtatccccaacattaaccctgtttggtgagtcgtttaagtgcgatggtgattttgtgtgtattggaactgtaacatttaggagcgttgtggtggttaattccatgatgtcagattcattcccctttgaaatttctgttggtgtatattttgaatcactgcgttgatcaaactcattccctgtaatcttatataaattatatgtatctttagcgtttttttgatcattttctagacggtttccgctggaataactggtatcataaatattgttggcgcttggggagctataactcgtgttatctaaagctgtatcgaattcttcgtcagatacatttcctgattcataactttctacaacagtgctggtcatttgatcttctttagcacgttctgaactcatgggtgtgttttctgctggtgcttgagtttcagaatctattggacctggggtcggtggaatccataatccttcgtatgggtcatccgttggaacggaccttgagtgtactggctcagattcaactgtttgtcccgagaggcatgattcaaaccttttaaaatcgttgtttggtgagaacttcaccacttcattccacatcacttccaactgtgagtacactccctttttgtatttagcgtgtttgtccatccagtgctgaaaacaggtagagaatagatccaacctcttcctctccaaagtacagaaattagaatggtactcggatggactttcccctatgtggaatatatctcagctttattaattatttattaaatatttataaaaaataaaaataatacctgtagttgaattattagttttatcgttaactctcgacaactgtgacacaacatccgcttgctttttggaaaccttactgatttgtgagagtacatccacatctgcgtttttgaaatctacaatttccctgagctcaggtgcgtttgtaaacaagttttgtatattatttccaagtgcaaccttagctctcactgtcctatttttcgcttttgaaattagcttggtatcaacctggtcgtctgaggccaggtactgtgcgagttgtgactcgtatgctaaacaatcctggagctccttatgtgatttgagtactacatcaacgtatttacgtatattactatgggagtaattaggcgagtttttaaactccttaagctttgggatgaagcctgaaatatcttgtcgaaacgctctgttttcatccttgccaaacgtcttcagatattcgtttgaaaatgatgttaggggcaccactactgacttatccaaggaggctgaaaactggttagcttcctcataaacgtggttcaagaagctcaacatgctccgcatcactgtcaatactcctaaaagtaattagatgattttaaaacgaaccagtttgttctgcagttgccgatagtataacgtttgataaattaggtgtatttcctctaaccatcagcaatgcttcggaagcttgtggcgttaaactaccagaagaggctatattataacatgttagtaatttttgttctgtgtcctttattgaagctgcgaatgtactataggattcggacagatcttggaaaacatccctcaaaaccaccaatgaatccaatgaaacgtctgttttaagcctaagaagcgggtgtaatagctccttctggctttctgataagtcatttaactccattattacttatttatgatctattttacagaaatagagaaattatataaaaatctttaaaattgataaaaatttaacattatttttatatataaaataatatccatggcgtaagtggaaaacatattttgatattattaaaattgcatcatgccacactcatatatggctttaaatacattacatgattttttccaggtttaaacatataatttagaattaaattaaaattatttttttgtttataaatattactgacgtagatttttaaacctatattatattatttatgctacacatttattattcactctcttccatcttatcattgtctttaacatttgataatattactaatttttacacgtttaataatttgtaactacattctgttaatttaattcttgaatcaattctataaacctttaaattgtggtcatttattattttagtacctaaatcaaccccaaaatctcttatcggcttctcttttaaattcttttcatttatattatatggaactatttctaatttatgtaagatttcaacattttcatcactttccactttagattgagacgtgtcaggacagtcgctgatacctttattggagccgttaggattaggatttgatttgtatcccccgttttgaatactcagatgtggtgtaaatttgacagattgtatgacttctctgaaaatgaagcttgtaattcgagtaacttgcttgatctgaaacgaattacggtgataaagatcttaccttattctcttcatctttgtcgttaaaagtagattcattcctataatccttggaaataatagatatataattttttccaagattccttgacgtggtcattaccaacgataccatatccttcatatgttcttcatcagactctccaatccaactctcaggtattatacatttaatagcaagtccacgatcatcaatgtcaaatattgctaaatcttccttgatatttccttcaactatttcaagatcgttatatctatcatagtcagagggtaaattatagtcaagggacttcggtgatgaagagtatccaagattataatcgtctgaatcagtggcgcctagtgaaattatgagatcgttatatacattttgatctgataaatcaaaatcgtctcgtgtttcagtaggggtttttgattccggtgtggagatttctttcttgtcagtcagcttaagacaattgtcgtagtcatctataatttttgcgtagaagattttatttttttgttcagaatttaacgagtctgtatatattagaaatattgcatggattttacacagtcttatgattttcttaaaatgaaggtcggattttctaaaacccagttggttaggggtaaaattatcaatccagttatgtaacgcgagtatcgagtctataaccaatgagtgtattttcaactctccaaaattcagagaatagtgcaatgatcgtaacaccaagttaaattcatataggttcttcacaggtaagtataaaaagtttctatttgttaataatgagtgtgtaaataatgaaacttacgataaatatgattcggccgttttcttttcctcaatgttaacctatcattagacgtatataaaatcacacatactatgttttcaattttattggttagtatctcaaaatcgaatgtgttgtcagtaactatgagtactattttacccagaagaccctccgtagtgagtaaatccgagattatgtgctaaaaagaatatttgataataaatttaccgaaattagaagagatttgcctgatctcgaggggcctgaaatcgagagaatattattcatactataatttcctaaacaaaaatattttaataagaataaatatgaatatgaaataatacactttattaaaacatactgatagaggaatctgagatatatgggcatgaatctagagaaaattgcttcttcctgcgcctcaaaacccttaggaatgaatcctgtgaatacatctcttattatcatcaatttaaccctttttgtcaaattttaaattaaaaatcataatattactcatttaaaacaatttagtgaataaatgtgaataattaaactacataaccaatacagatgctacacattcaaataaaatttaaatttgaaaattatttaatatttgaataacataaatcgacacattaaatttagttttcatcaattttacccagtaaatccttttgatctttcgacaaagtttttggtagttgcacattaagcttgatatagtgatccatgttattatatttccctactttaatctcatcaccttgctgtgaacatgatggtacttctatctcatgttctccgctaaacgttcttactttaatctaaccatttattcaggcattatcttacatacgaatattaacatctagtaatttagtgtgtatgtatcattaccttccctcccagaatagcttttgtgtatggaatattacaaacagtaacaattctattaccatgaatatattcttcattggtgcttttcacgttcaatttaacatacctatgaaaattttgagtaatttactacttacaggtcaccgtcccttaggtgaaaaccacctgaatgtccttttcccctaatctttattgttgatcccgattttgaattaacaggcacattcacctatttaacaatatttgattatgtttgataataatatttaatgaaatatatggtaaagtatactttaaccgtagaatctttgagaactcttccagtattatcacatttattgcagtcctttaatctttgatatcctgttcctctacactttgtgcatgttcttgaacttctaaaaaatccgttcttggttctcttctcctaaacaaaatgtaatgctgttaaaactaatatactgtgtaattcttactttagtttccattccttgtcctttacaaacattacattggtctatgaattcattcatagaatcgtcattataattacaaaaattgcaattttcccatttatgtactggtattgtaacatttcctcccattaaaagtgtttttaaatcaacatcagcttcacacgttaagtcaagccttgaattcgttctcactttactctgcttcgttctcttaacagtaggcttacttaatccaaaaagatttgagaaaaagttgccaaatatgttattacccaagcctaaatcatgtatataatgatataaatagtctatttaaaaactatattaacactaacctagtgataactcaggtgaatcgtcatcatttatgatggaaatttcaatttcatccgatgtgtcatcgtcgtaatgatctgtttcatcatcaaattttgaatcgacgtagtaagcagtagttctctgattatagtcatcatataacttatcataatcctttctactactttcatcagaaagaactttatatgccaaatccacatccgacctaagtttaggatcaacacttggaagtgtgttcaaagactcatttatgttattatatttatcaacaatatcgtcatgagaacatgatttgtcaagtgagagaatcttatagtaatctacaaaatcgctttcatatccaaaattattatttttagcctttgttttggaaaaatcgtttaaagattccaagccgttgatggaatcaacatcaaaagaagatttataaaggaatgggttaaggaatccagctgtcaaaaacctgtttctgggagttctaataaataaaagtctgttatttaatattccaatattactacggagcgttttattttttttaatgttaattgatacagttaaattaaaattactaaatgtgaatatgaagaagataaatctaatatatttgtacgttaaaaatagcattatggttatttaaatataaacgttccataatttaaaaattgtatgtaacatcaacatcttctcacaaacttatcccacatatgtactattatctatacacattgttgtaattttactttaattttactagttaattcgatcattctaaattatttatttaactataaataatatcacttttaattctcaaatttcactattatgtctgaacttgaggatatttaccatgaaatttcgagacttaggcaagaatatgaatatgtcagttgatttatatatttagttattttatataatcacatttattaatcatttattaatatacaaattgctatattttattttttgatttcttacctattataattttttatttaataacaaaatattcaattttagcatttgaaaaacaacaatccttccgctcgtgttcaatatgaatacgcctgtatgctcatgtgttctcccaaatcatcggatcttgatactgcgattgatcttttcgatgaattgattcgaattcagtatcaaaggtgcttttttcatttatttatacttatatatacattatttttgattatttgatttgaaattaatttatagcgttaattgtatgtaccaacttgctttgtgttatattaagcgtaaaagatatcgtaaggccaggaagtatttggagctcattcttaggatggtacttcaatttactatctaactgagtatttaggatcccaggaaccaaatggcactttctcttaagagtttactttatgttttattatcggaaggtattaattttattctttattaatctctatagaggctatgtttggtacaattttcgctattatgacaggtatttctccatttaaattaacctatacatcaggattctgtatattctcaatgtataagctatggagaaagtaaatgatattctgttccacatttaatatagttaattcacaactaattaattctactaactagcacattacttgtatacatatatgcttaagttgaaaaattaaaagtctacaaaagttgtgaataggtcgtacgccgcaaaaacaaaaatccaatttgcatagaaaactctgtgattgatagattccattgcgcgcttagatgctttatagtataaaagtggtagtcttggactggcgttatggaatttctaatattatttataatataaaatgtgtttacctcgacgtttgttgacatattacgattaaaatgaaatctgggagataaagttccagaagtgttctaaaaagtgttttatatctaataaggtattacctttataaattttgaataaaatctgagaaaagtcattttaaaataatatataatgaacatgagatgatggtgtatgacgaaaaataacaataactcaatataaacataaaaatataaaattataattaatgttaattaatataaaattgtaaacaagaaaattaatatgataagaattgattttaatatgattattaaaattagaccttcagtttagtcctacgccagtaccttcttttcgcattatacctataaaaatatgtataataatttttatattattatctgaaaataccttattttgtttcctgtctttagcctaaaccaatgtggtatcggtctgttttgtttcatcttcttgcctaaatgtttcttaagggtcaaagtcctaacggatccctatgaaaaatattagtacaataatgggtaaaattatatattaataaataatagttcattttatttgtcagtttacaatcgtgtataatttgaaattgtcaataactacttatattattataaatgaatataaaggttctatattatgtaaaaagattaccattattaagaatctaataaatcagactacttttatataaaatgattaagatttatttgaccgttctaatgggggagaaggttatcgaaattaatgtaaaaatgatatttaaatcctatcacactacaaattattatttattatttagtacatttcttagttgataatgtttggttttacagtaaaaatttctgattcaaaatataatcgcatatgttcaatgattaataaatgtgttgagaatgatttctgatgttgacgtaaaacattcaaatatcaaatttaaactccagagattatatattttagtctccatgtttgtttttattttaaattatttaataatcttttttattcttattaaacacatttcctttatagatattcaaatttaacggaacaatctgaaacgttaaataatttaaatattgagcagtctgatatcgaggcatactttaagtccaacattattttacaatatggaatccttggttatgtcggatttcctttcaaagtagtacaatttgacaatgtaaataattctttcataattgaaaccaataatgagtaagtttatttttaattttaacaaataaatttagttgtttgacaaagttacagttaattatttcaaaccaatttcctgcactttgcccagttgatttttcatctaacatactaaattcaaagctagaatacaaattcaaaatattgaaatttaacaacaccttatcatcattaattcatgatgattttgttctcaacacatcttaattttattcattcattatatatttttcattaaattctaacattatctacgttttaatttaattttcttttgatatgcttatttcatcaattttaatttttgtgaaatttgttcttctataatttacttatttatataacaatgggtgatcatgaatcgtctgattcaccaaataagagatataatacgagaccgaagtcaaaaactagtttcgaagcaattttaaataaatatgatgatattgaaagtgaatttgcaccaaagccttccaaaagaggacggcctccaggtagcgggaattccgcaaagaatcaagctatgtccaaatcccaaaattacattcctcaattttaccaaaataatatgcagatttatcaaaacaatatgggaggttatcatcttcaaggtaacatcccaaatattcaatatcaagttccaacacaatatcctccttataacccttataaatttactcaagaacaaatgaaccaacagagttttaataatagaatgactcaacctaacttcggatacatgtatcaacctaatgtgcctcaaaatgtcccacctcaagctcagttaatgtataaatctggcccatacccagtttcatctaacattcctatgcaatacaggcctaatgtcagcccagtaatgtcacagatgcattacgaaactaaatttatccctcctattcaaccacgtcaacaccctcaaactcaaatggttcaacctcaacctgttagaggcgctcaacttcatggacaattggaacaacaacctaaacgtcacccacaagtgccacaacgccctcaaatgattaatcagaattatcattatggcacctattccattcctaaatctcccataatggataaaccgccagtacaaatgaatcaaattgacaagcctacaccgaatgcttctttaatacccaaacagcctatacaaataccaataatggctaaacctatttcagagacacaacaaactgagaaaactaaattggaaaccgcacaaattactgatcctgagtcagaagctgatttaattcgtaaaaggatgaagtttacaggcgaaatgccaccagtaattatgaactcacaaacatatgggtattttttaacaccaccgcaaatttctgaggaacaattacaggaaccggataccaacggaatccaaaactattttaacgcggttgatgttatccttaaggatatttccaagagctcaatgagtaaaaatatggatagtttaatgccaagaattacaattacagggtcattcaacttaacaaatttagataaatttgtcgagtttaactatctacttacacctaatgtttataaacaagtccttgattatttcaactctctcggcgaatcaaatatcgagttcccagttctactcagcacatcatatcgcaaatctttatcgaagtcgctttcatcgcagtcattttcaacacagtcggattcagataaatctccgtctgaaaccccaaataactcacaatcagattctgctaattgttatactgaccaactcgattcctccaacgaaaaaccgaatcaagattcacataaagttaataaagatttgaataagtcacaagatggcgtgttggataaacctgagtcacccaaaattaagttgcaactaagctcgccaaagaataaacctcagcccgggactcaaaagactaaatctgacgagtttcaggcctacttcaagtctaacaagatcaagttgacccgagaaaacaacgttcttccaataacattcgaatccttaaaagaactgactcctcaggaaattaatcaattttttggtctcttggataaaaacatttgtaaagttatcagaagtgaaggcgttcataagtcaataattaaaagcgtgattatctcaaacaatgatttaaaaagccactaccaagtgtgttactcaaaggacaaaaaaagctcgtttgccttaaagtaccaattcgcttctttctttgcaaatgacttttttgataaaagagtcccattcttcacagccgttgattttgaacatcgtgacccgtcattcctcctgcattccaagctagggactaaaaagaataccaactcgttcatctactatgccaaggtttcaagatcattcgacgcctttatttacaagctttatgctcacgtcaggtttgagctctcgaaactcgtttctgagcttgatttgaacgccaagaacccaactcaccagctttccatcaggtgctcactctccaatgttccaaaaatcctcaatatgattcactctaacaattaatttgctgctacttttatactcttctcacttctatatttaatagactagagtatttaatgagaatactaacgaatactagaaagatgagattacaaggccccgattttatacagttctgggtccagggaataaatctggtccttcttcttgatgcaataaccggtaagaagaatcgatgttgtgattttaacgaaaaacagtgagagccacgaaaaggcagagatgatcaggatcttcggtgaaatgtgaaatcccattttaggtattgtggatattatcaaagtcacaattggcgatgatatgaaccccaaccgcctacattattttaaatcatgataacactaaacttgattaatcaattaaaggagcatttaccatgtaaattaccttgaagagatgtgtgagaatgagaatgagcacttacagggtacttttaatttataaaatgtcagactccttaggttatacagtgatcttgatagcagtctatctgcgattaggacggaatcgtatttttcaaacgtttctgaaagtagtttattgaacttaatcaggtatgagtgctttacgaggtcaattaagacctcaatgccatacactagaaaaagccagctgaaaactgaaatgtacgaattcaaattcctacacgtgttatacatactatagatactaagatgttggtgaaattaactaataatgggtataattaagtgaaattgttgtttatttaatagtacaaccttctggatgtcgacattttgaagaacactagtaatccgtctaaaactaaatgacatctttcaacagcatctgatgcgaatattatgaatagtgaaagctgagtgtgttttttgaacactgaggacttgatttcaccgaagttgttcgttattaagaccaagaacatagtgtactctggcgaattaattgctatgttcagaatcagcaccctcaccaagtgtataaacgcgtgaaaagttattgttaagactacaaaacagtacagaaatacaaatttataatatatattgaacccatccacgtggtttctacaactgctcaacagcgattctgttttatttccaggaacaaatccttcagagtctaatgatgatctcctgtttacagacttattaggatgattctgtgtgttattggtgtgtgaatttaaaaaacttttgtttccgttattgcctaattgacacttttgagaatcaggtttctgaaaatttactctggcacttgacacattagtgttattgaactgaattataaatatgttaattgtagttttaacgagactgtccattatatctctgttgaatgatctgcaaagcctttcacaaatttctagcatgttaaagagcacgtataatttcattattggttgcgcctttatattatggtacacctttgatgtatctataaatgaaaagatataaactgtcgccaacagcactagaaacctcacgcatccacacacctctgtcaatgttatgtttctcggctcatcaaaattctcacttgatttatcacttctaccactattaagttccttatctatactcaattatttattataaataaagaatgcagaaatagtagagtagtttatgaaaatctaacaagttataacctttatgattgttgaagaggtttaagaaatcattgcgaaacatatactttaattctttaaaaacgtataataaaaacctagtaataagatatgatacagtagttacggcctgaaaagtatcataatatttattatattacctgaattggcatgaatgttagttcaaataaaacagagtcaagacaaatgccaacggaatggaaaattaacttttcgaaaaatttggggagtcttgccatgtgcagtagaagattctaaacatatttatataaacgtataaaggggaaataccttaggaattgaatctagtacaaagttatagccaaatttatctgtgttatttgttccattaggtgaattcaaggactcgttgtaatctttacagggcggtttatcacttgattctattttattttgacattttttacaaaatgtgtcggaatttaaggattctaggacatttttattcttctcaaaatctttgctgttgataaattcagtgttatggatttcactgctcgagaaattttggatattgttagtggcatccgtagaatttgacttatttaggttattattgtcatcgtcaaggtcgtagtagttggacagccctttgaactctagttttacaaatttgaaaaggtttaaaacgtaaaatttcatgatcacaagccagtaaacttgtaccttttaaaagccagtttaatcacgaaacacattttaatttacaatataaaatcttttataaaaaatacaaataattattttaataagtttcatctagaattgcatatcgtattatcgcatttatttttgtagaatacacgacattaccaacactataaatataataaattaactgtaaattaaaaaaaataattattcttcatctgagcttgatatttcatcatttgctgtgtattctttccctatgttctcttcttcgctatatccgatgattgtgaaatcatgtgttgatgttttactaaacttactagtgacaaatgcactcgttttattcacttctaaaggccgcttgccccgattactattctgtttcaacaacgtgccctttgacatgtattctatgaagtccattcccagctgtttagatcttttgtatggtccaaatgtcattgccaaggccttcaaatgttcagggattgttatgtagccagtggaattaggatcttctgtagtgtttatcttgattttcgactttttactttcattttctaggtaatttaatatatatgctgccatcttattatcattttttgtgaaaaatgtgtaactcgttcccttggaactccctcttgcgcaccttccaactctatgtagaaatgtatgaaaatgtctcggggtatcgtagtttatcaccactccaactgctggtatatctaatcctctgcaaaccaaatccgttgcaatgagtgttcggtaattacccttcttgaagaacgaaattgtcccatgtcgttctgtcggtagcatatctccataaagtttacagcaggacttgtaagctgagtagaggaatgaatacagctgttcaactgtttctcttgagttacagaaaattattacctgcgattgtgactcaagtgccggtagattatcttccagccaggtgtttttctgagccaaaaagttatgtgagaagaatgttagaaatttaagttgtatgttctcaaggttaattacgtctgacaagcctactttcactgttattgtgtttcttactagagactttatcttcttgtatatctcatcagttgttgatgccgaaactaacaccatgagggtatcgtctctcagtaaatttagtatacttattaccttagattcgtactcctttgtaaacatcttatcggcttcatcaagtacgaaaaacttagattctgacaaattaattcccttggatgaaatcatatcaactagtctttgaggagtgcaaattgcgatttcacatccgttgtacactgatctgaacatttcagtcttatcaactcccgctgtgattagtgttattcttaaattaattcccttgcagagcttctgcagcaagctataaacctggttacatagttccctggtgagtgtgagaatcagtgcgtacacattctttttacctgaaactgacttccactgcttaattaaatcaagtacttttaccactattggtattaagtatgatatggtctttccgcttcccgtttcagataatattattgtgttccttccctgcaaaatacacggtattacttgactctgtacgggcgtcggctcgtaaaatcccattttttctatgcggttcagaatagttgttggtatactcttcgataagtggataaatgaggaaatgggctttggaactctcgttccaaacgtctcgatgttgaatcttttcttgaaattcacgcattcttctagactcatagactccacctcttcatctggtatgtatatgttctttacgtaatcttttacacttatatcattctgtgtcagtgaaggttttattgtttttgcgatatttagttcatgttggctttctttagcatataaagtggaatcattttcatttttttctttatttttctttaaaatatggtaaaattcttctaaatgtctttcattgtcattataacatatttccgagttgctgaataccaccggctttgattctaccaacgtttctatgtaatcatctatggaatctttgttgttttccttagaatctgcaaaaataaaattattttataatccacattcaaattagtttaaaatacctggattcattttatttatgtcaatatattttttatatttaaactttttataatatcattaggataaattataatttcttcatttactatcgtacatcatgaatatttaataataattttattatttatcacaccatattttgcaacatcggaaactaataggtaatgttgtgtattactagtatacaacaaattagtcagaagatcttaaaaatcagcagcgattgataggtgatctgatggataaagttttgagggcaatccaatgtattctgatgcttcttctgctttgattcctggcatattcctcttcacctacaacacattttataaaatatttttttaaatgatagtgtatgtgtttaaatagtcaaatatatgtttatgtaataagaatatgtaatttaataccttgacattattggagtggaaaataaagtccagtgttccgttgaatacttggcaatagttagtgaagggtagttgtttctggtcatatgaatcagaataaccttgataatttctaacttgtaaactttcatttttgttcagatcgtcctcatatacttcaactggttcaattaatctttcaaacccatcacacaccaaaaaactcttatcataaacaaatctttcccctaaagatttttgttaaatattttcacaaattatttttatataattttatgtatatataatgtttgtataatgtaacgaacctaaggaccaatctggatgattatatgaaacatgtcctgttaagattaggttataaatagattcattggggaatgaattaaaatctccgcacatcaatgtgtatgaatcactgttaacatcgaaaccatgtttgtcagctgctcttattttaaacttctctagctcatttagcattacataggtttgtaggagccttatatgtcccgccattgggtgaaagtataaatgcgtatttgccacgaaaagatatttatttgtccttttgtttcggtaacatccaaactggaacacagtgtgatacttgtcaaagtagttttcctaaacacaagttatttaaatatgtagatataaactaacgccgtaggagagccattttgtacacaatttatttgtgatttcgttatattcatctgattttaccacatctttaaagtagaggtcatggagttcgaggggagtaaacatgctccgcttaacaaaaattgcgcatccttctcctgcgtttccaccctttacagtaagccatgaatgatattttgtgtcgaacagaaactttaaataatcgttatagactttacgtgaacactcctgaaggcacagaatgtctgggtccaggtagttaatttccctcccaattagctggtttctatagttgtagtctaagaattccgccgggcaatacgggaagaatgttgatgacgggtctgttgacgtcaaatatgttggggatagaatgttgaatgaaacgactctggtatcgtagttcgggtcctgtaatgagttggaaacatggttttttggcgaagaattgaatttcgatatacgttcaaattgccactgacaattcggtgataattcaattcttgataagtttgactcgaatatatcatatttcataagtgagtttgttactcttgcctttatggttttgcccaggtcagataaccttggaatatattgcaaatcgttactcagaaggttaccttctgaatcgagccattccacaaagacatgtgaatagttgttttcctcttcatctcttattgtcacagggacaggacagtctaccatacacgtttgtaacagcttaaccttatccagctgggggacgtttgtgaacaacttgagtaaattatcatttattgatataaaggaggattttagtattgtttccttacaatttgaactctcatcaaatgttttgaagaggtttgtcagaaatgatactgagtactctgacaggttatctatatgtgtgttacttttcccatttccagtttttaataaattacgtttcattcttgctagtgtaacgccgattgtttcggacttatctctttccattttaagcttccggtcattccaaaagagggttaggtacaacttgtctccctcttccgggaccctagctattgcataattattactttgcatttgtgatatattattatcgatgttatattcctgatagtctaatgaaccattaaatgttctcaaagtattaatccatctattatttaaaatcggccatattattgactgtaatatctgattatatcctcgcttttcgacaacactaaaattgttccttagatttgtttaaatttatgtattgatttatatataactattagaaaccgattttacctggttgtgtttgttgtttgattatctggtttggaagaaacaagggatctgatagttgaaagaaatgacaaattaaggtcggaaggacatctctttaaatgataatgtttaaaatggtaggatacaaagcgattcctgtagcaatataaggaacatctactatacatgaaatatattaatatattggtggaaaataatcttgtgaatctatcataaattgatgaaatggcaaagataaacaggatgacgttcatatgagtaaacaaatatattttccaaacctatcatgataaaagagagtaaaataattactcgtaagaaatttacattttatatatgattaaatttgttaagaatcccaatatctatatctcatacactatgaactactaattaacaactaattataattttataatatattttaatttatttgattttagttgttctaaatccctttaatgtttaaaatgtgtttttagtttctataaatgtcaaccctagctaggcgtaggattattcaggatatttccaggattactaaggatcctcctaaaggcacgaacgcccttcccttttctgacaatatgatgtattgccatgctataataaacggttctgagggcacaatctgggaatgtggaacttttcatttaatcataaagtttactgaggattatcctactaaacctcctgttgttcggtttctttctaaaatgtttcatccaaatagtaagaattaatttataaaatatttttttagtttattacgatggttccatttgcttggatattttgcagaagcaatggactcccatgtatgatgtttcttcaattttaatatcaattcaggtattttattcattattaatcattgttagtctcttcttaatgatcctaatccaatgtcacctgccaatactgaagcttctgagatttacactcacgatttctttttataccaaactcgtgttcttcagtgtgtagaggatagttggcatgttcctgttcttacggattcttttcttgattctctttaatcgcataatgttttctccttatatttctatattttatcatatatgcacatatatttgtgtatattacttatacctggcttatatactatcagtattatacacttgtaatatagtgtatataaattatagtacaaacacaatagtgatgggtagagtattatattatcaattgttgaattctgttggagtaattacatcatcaattttcagtatcattttgacaacttgagttgcaagtgagagttgttgtactttggaatggagtgactcgaatatgccaaactttgaaaggtcatcgatttccaggttaacgcaatcaattccaataaatgggttgttttccttaatttgcctggcttttgcctttgtcacatagtcaaaggagttaagtccagaattatctgccaatgcaagtggaattgataggagggcgtctgcaaaaccagtcaccgagtactgttcgagcttatcgaaatttgccgcagctttttcaactgctattgagcatgcaatttctggcgctcctcctccggggactactcttgaatctcttatcaagtttctcacacagcatattgcgtcgtgaatcgacctttcagtttcacaaactgtcatctggttaccacctcttattagaactgtaactgctctgctatttgggcatcctaataattcgttaatacaaattaaacaatccgatggataaactaataattgaatatctgttattatatataccttcaataacgacaacttctgagtggtctgtccctgttgcaatttctctaataagtttggcggttcctagtttttctggtgttaaatcttcgaatcttgcaactatttggcctcctgtggctattgctataagttccatttcaactcctcctacccaacgcactgctggaatccctctctgcatcaagaggtggtttgcttcatcatcaaatccccactgacaaattacctaatttattattacttttatcttaataacttacaaaattggctccagatttctcaactcggtccaccatgtccaaaaagtacttctgttcacattcctgtaacttctcatagctttcaacgtcttttatttcaattttgttcttggtttttggcttcggctaaaaatttattattttaccttatttgtgaaatttactataaatattaaccataaataaatggctgatatgcacttacaggttcaaatgggcaagttagaattgcaattttagcatcccgggtagtctttctcatctgtgaatgacttaaatccttattcaaaacaattccctgaatcagttcagtctgctctaatcttcctcccgccttactctcaatctattttataattatatcttccatataattgtagtatattagcatttaaattagttaaatatataaataaatcaccttgataagctctaaattaacatctttcctttctgtatctgcaactgccattactgctctaactgcaatatcagccaagtgtgactggcaacttgaaactacttttgatcctagagacgtgaacgccgcttgttttctgaacatttggttatatttgtttaaataataaaactatctatgatattgtatataaatagggttatacagaatgtgataattgtcggaaaatatatcttgttgaatagcaatttttttaagtgtgtcgattgcaatggagcacgcttgttcgtagccgtctgcaatatgtagaggatgaaggccacgatccaggaacttcaatgctttatcaagaagggctccagctagtattacaactcccgttgtaccatcaccgacctcttcatcttggctttttgataaatcaaccaatagctttgcacattgatgttgaatctacacgtttaattagtaaatctattcttttatagtataatcaggcataatcttgtatataaaactcacttccattttctgtaaaacagtagctccgtcgttagtgattgtaacttggccatctggtccaactataattttatccatgccctttgggcccagtgacgttgtaagagtatctgacacggctcttgcagccaaaatattcgacttatgtgcttcaagcccggttattcttttcttttcttgttctcttactatgacaaatggtttcccaaattcatcaaccgcaacgttcattttctgcactttaggaaatattagggaaggtatgataaactcacttttgaatagcgaagttatgatatacacttaaatgaaaataaatcttgttaaaattagtagtgaatttgcaaatcaaatgttttaataattattatgattaatgataggagacattatatgtggtacaagtaagtatgtgaaaatatcgaaaatacataaaaatcgcaaattaatttaattaatttaaaagattaaaattatttttatgtttacataaaaattgatatgggttgctactggatttttttcttggacttgaaaagtacaaaatataaaaataataccataatcaagattcctatagccatcattgagaacttccttattaaataattccgatttaatttttttgatgaaagtctgaattttagcgtttgttgcttgagtccgtcggccattcttccgatatctaaacaagtgtgttttaaaaacactaaccttctaggttttctcctctcgccagtatttcatcaatatttttcttcataatattcgttacttcgttgaggctgtcgttgatcatattcagcgacttgagtgaatttggactatttatttcattctttattttatatataactcgatctacaaatttaatttttattattaattatttatcaacataccaaatccgataaaatggtatggtttcttgaccgatgcaactgctgatgtcacgctggtgtgttcatttccaaattgctttaaaacttcctcagtaaaagccttacaaatctgtgcaaggaacagaaagagtatttttttggggtggcttgatggagcgatgcacatgtaacaaactccgtcttctaccatgtaatggtaggacatctctccttcttttactgagcatttcgagtctgctgaacctactgttctacatatcatacgagaattcatttttattgtttgaaaatcaactttcttagtattttggttgtttactgaagtatcaaaattacgatcattccaaatctcaaccagaggaagcccatctgatgagcggcacaaaacaacgatatcagccattattaatgttacataaaacttcccatttcaagaaatttaatagtacaactaatttttcaaaattataaaaactgagcaattacatatattattgttatataaccacaaaattatgtgaaaccttcctttactgaaaaacaatttgttaaatgaattaaaataaaaaataatttattaattacaaattaatcttattttaaaaatcgaaaacgctactcctcacacgaaagcttcccttcctccctaattaaatttaaaaccaggtagttataagatatactttaatgcttttattgttttatattcatcatagtgttttttacgttgttcttcaaagtttttccttttctcgtcgtcattttttatctccattaacctattaaccacctcttccgttacagtcttttgtacctatactctaatataatctagaaccagatacttctttgaaatgctccgatctgagattaaaatcttcctctgatccagaatcctaaaatatatttttatgcaataatcttatttatccacttacccatgtgtcgtagttgaatggagttgaaacttcagttattttcatcctcgtacctcgctcattgttttgttcactaatacttttttcatcccaagtaatagtttttttcctattaaatgattttactgtgtgattttgattatctcacttgtggttacattcctttttcatctttatttaaaatcatgatttatgatgaaaattaatagtgaaaaaaatatttaattaaagcatcttaaaataaacgtaatataaactcgtaaaaatatttattatattatatatatgaatagttttaatatgccacacactgttatggacaaaaaatgctatattacgtttttatatgaaactttatggattctacattttaaacactattcaacgacttgttattttacagcgtttgttttaaagaaatttggtacatatgtagataaccactgttctgatatctcggttacattttgaatataatttttcttcgttaatatacagtcgttgaaaacaacatatctaaattttgattttactaattaagtgttacccaggaaaggtgggtctgttgaacattactgatgatggatggatgtatacacattgattgttgacctattgaaataattaattttattttactctaccagtgtgttatatgattttgtttcagggcagaatttagctgaattggtccagtttccctttgtcaaacacttccttacctggtcccagctcgatgaatcagttaatttggatatgttttttactccaaattgttctgaggttataatagatacaagttggtttctgatatcctttgctctattgaatgcgtgattatttactgcaaattgtttacaaaatgtttctcgggaatttgcctacaaatcaatatcattccaattatttttacattttcccaaaggttatagatattcaacagtgttaagtggtctccgtacttattatacaaatttgatcttaatttcactccctcaggattaaacttttctacaaccagtttaaattacataaaaatggttaaatgatgtgtaagtgaatacctgtatcaaagagtgcaatttctgatgagagaatagaaacaattgtcaatatttctgaggtacatgaaaactcaaatgatgaaataagtagtttagaatgcattggcaatagtggtatctgtgccatcatcttcctacatagtaatgaaccaaaccattataataaactagttaccctgcttctgttaaattcccttcagaatccaatgctccaagtctgtataagtttaatgcagctgataatattgttcctttatctggaggatcaatgaacggaaactcgaatatgtccttaactccgatcatctaatcatatataaaataatttgttaaagggttaatcttactttaagttgaaggaaaacaaacgaaaaatcgataagatgtatttcaggagttgtgttttggggcattttttcgtatgaatcaagtgtgtagagacggtatatctcccctaaactctataaaaatcagtcacgtacctggcccttctctcccagctcttccagctctctgtttagctgatgactttgatgttatgttaacagttagtgattcaaagttattctttgggttgtactttctctgtttaactaggccagtgtcaattacgtatttaatcccaggaatcgttagtgatgtttctgcgatgtttgtcgctaacaccacctttctggactttggtggtgtagttttgaataccaaattctgcctttctagcgatagtgcggagtataatgggcatatcaccaacgatctccagccggtcattttatacttcacttctcctacttttaaaaacactttgttcatgtttttatggtcaactgactccattgagtcatttaaatgtttaactttttgctttaagagacgctctagtatttctatatcttcttggcctggcaaaaataccagtatgtcacccgtttctgttgacagatttatctgcaaaaccgatatcattgcagcctaaccattattataccatcatagtacgacaattatattatttatactaatttagatatatattaatgcattaaaatacctcgatataatcttcaaagggtgctggtgtgtagtatatatcaactgggaacaatcttccgggtacattaattgtgaaagaattctggaaaaattcattgaacacattagaatctatggttgcggacattacaataagctttagttcgggcctttttgtgagtgctaatttaataattccaagcagtatatctgatctaatcgatcgttcgtgtacttcgtctattattacaattgaatattttgacagaagtgggtcagatattgattccctcataagaatcccatcagttacatacttgattcttgttgattcattagatttatttaggaatctcacgttgaacccaactgtggtaccgagttcggtatttgtgagattcgctacatattttgctagcgaaattgccgctactcttctcggttgtgtaactaccaatttttgtttcgggttggtaaaacttgtgtaaagccataatggcacagatgtcgactttccactacccgttgacccaaccaagatcaaacattggttttcttttattttttcaaatattaggtccttgactaggttaattggcaaggattctgaaatcatattatcaaataatattctaaaccgccacacacataaattatacatatcacatatttatcgatcaacatctaaaaaattattctatcttattccatttcaacttgcataggtgtaaaaacacaagaacacctgttttaactgccaccaaacctatcatgaatatcataatgccatccatactgtaaccttttgagagaaggctgtcgtaaatcttcggagcagtgatcatgactattcccgctagcaagttgagtagtcccatgagaagtgtgctaattgaggagtcgaatgtctccacgacgaagagccatacctgtccgttcaaatgtgacgtgaaaattgaatagagaataattgaaatgattgtcgtacatttgtggccaaatgctatcgtcatataggacaatagaaggaaaagggtttcgaaccacatgatgtacattgatcccattcggtccaggaatgatgctaaagccaagcatactatgactgatgcgcccattccaattgccagataattcctttgctcttcagtcatcattctgtttgagattgtcatgtaaaatgacgccgttatcattactattatgaagatgatgttaaccatgagaaagtggagtgagaaaaccgatttcttcaaaacgccaactttatctacctcaatatcgaataatgacaaaatgatctccttcttggatttctttcttttttcctgtttcttgttttcgccactgagtgattcgatgcttgttgcgcttaatgcttcgtctatttcacactgcttgtaaaaccttttcggcggaaagaagaggcatgctactatgaaaatacccatacacattattggtagcgggatcatatttacagccattgatatattggttttgaacatgacgagcttcataagaatcggaatgaacatacccactgacatcgacgctcccaacagtgaggtgattagcagttcatgatttgggaacagcaatgttgcgttaaagcacggcagcactaagaaatccaaaccgaacccaatgaaaattgatcctggtacatagaacttgaagctttcgcttgagaagctgatgaataacattccaataaacattgttgctgttcctatcatcgccgtcaatttagctccaataactatgttacacgagcctgcgaatattgatccaaaaaatgtcgacgccattaagtacgaaaaaacgttgttgattgccatcgtttgttgttcgcacgctgcttttactaccttttctgttaacgatttggcaacttcttgatcgctacataaccatacatatgctccgctcttcacgaacatgtcaaagaaggacggaaacgcccacatgaaccttccaaacagaagcagcgaaagcattgttaagaacaaaaagtagtacctgttcgttccgtacaccttgcattgtgttttcgcattctgagcttcctcgtttctgacgaactcctctatgggatgtcgaaatcgaaacagaaatgtcattttttcacaggttttttgaaatattttacgatgctattgattttgtttttatttttgtttaatgttatttaaaaattattaaaatgtgtttttatatttttgtaattctttttatattttttaattctgaaaacttatttaatttatatttgaacagctacgttaatatctttatttaaaacttcgtttgtatccttttaagaaaacattcaatggcaaatttggatattttctttactgaattgttattttaaaataatattgaaaacccagagggaaaactgcgtttgttgatattttacggtggaatccaagattattttagtagaagatttatataaacttaaaaataatgatattagagtattttacaaattaaaattaagaatttctggatttatattttacggatataatagagtcgttccccttactatatcgatctgaacaaggttaaaaattttataaaaaataaaagagaaatgaaatcaggagcaaatattttacaacttacttaaaatgtgcagacttaatcgtttttaatagatccttaatttttccatgctggggtatatacaccatcttatgagcagctatttatagattcaagtatgtctgagacatataaaatttcaatttcaagctcatcaaaataatgataaaaaatggatgcttgtgatcctactatttattggatgtgtatgaaataactctaaaattctggtaatattttagaatctgccatatgaatatccttgatcaatctcaccagcagtacttatctctccctaatttaactctttcatcaagacgatcttcttgtgttagattgcctttaacggtcttcgtaacgtttctgtagctccacataccagatttctccctaactgatatggtggtggttttattcttatctcttaaagtctcaactttaactccatctttatcagtttgaacatcctcttttcctaaacgataatattaaattatgaagcaaacttatgttgtaaggaatcgttgttattaagtcaacactaaaaggctcatcaattgacaatgttctgttactcaaaatacaagttataaccctttcctcagtgccatgagttaatgggtgctcaatgatgattctgtcgttaactgaagcctcttctacaaactttgtttcaaacctgaaattactaataatataataaatctaacccttgaactgtatttgatgaagatactatccttccagtaccaatgaattcattaacctttttgttttcactattttcattttttgaatcatctacttcactggattccttcttctttttcttgtaaagtttcgagattcccttgagcttaatctttccagaaacctttcggttatataagtcggaactagtcattatttataacaaaaaactactttatcattgtaacaataattttaaataattacacattaattaaactattttcatacccataatgattaataacattaacatccttactattgtcatgtttaatttttttgaaattacaaaatgtttaaaaactgttaaaaatttgaaaattattttattgatgcacggttttatttaaaatcgcataaatttatggcaaaccttgctactagaggatactatatcacaggaataaacaatgttaatgtacgtctatatcctcaggttcttggtatttacaagatacatgaacacaacctttgtaatgcactgagggactttgggctgattattaagtctgacaggttagttatttttacacatttataattagtcggcgctctcttctcaactacaattatgatttcttaaaatttttacaagtcatgagaccaagcgaagtctgtatgatagctcacggttactctttgcttaaactagacgatagaaattggtggaactcattcacgtcgatttcatctcaggtatacctttgctgataataatctttagctactttatgacattgacggaaaggaaattgcaggtcttctctacagtttaacaagggtaatgattatagaaatcaatagttttaggtgtattcacagaaaaataatttaattgaacgattaattgacgagtccaagtcatggataaaccttgcgactccaacctcactatctcttttaggtatattcgcccttttacattaattaaatgataaataattgtataatgtatgtacagttaaggttgcgactcatttcaattgtggtcctgagataatgaagatgcttaatctgagatcactacagctaatcgatgacctgaagattgtagatattgtgtttttccgtacgtttttatttttaataccttacagtcacatccaacgttgaatcaaaaacacatgatattaatttctttcgtcaaatgtgtttaagaatcatcgagataattgacgaagttgacttacatcacttgagagctataggtacatttataattagtatacaatatattaatctgttacattaataataattagctgcttcaataagcatgggtggatttaagtcccatataatgttcaatgttttgacaattagattatcgcaaatcgcttccaggtttgtaaataaatgaaataaattttatttcatagtaaaaatcttaccgagagtgatgtcatatcgatacttttggcattcactactcagaagtttcttgcccacaatgacctcagcattgactctaaaacgtataaaagatttcttaaagaaaatccaacttcaagtaatgacatcttcacgttccctttacctgaatttggacatgtaatgtctgaatcggtttatagaaataaggaccgaatcacttcaaacggtttgccaattgtttttagagcaatttctatacttaagatacccatagatgaagatttttttaatcatttacttgccagaacttgcaatcatatagagcaagatttatacaagggattgaaactttctaatcttgtagtggtacttttagccatgaattaacgattttcagacctttgtgaagttcaacagggacaattctgccttttggaaggccatttatggaaccttaactagacagtatttgttacctatttgtgtaaaataatttaggaatgatttgcagttaactggagatttagtttctaagatgataaacacaatttcaaccatcgaaccagggagtttatctgactctaaatacctggatatggtcagaactactcttataaaggtatgtttaaattttttatatttcttagaattgtgaaaattatgcttcttccatgagtgctaggtctcttttggccttaaatagacatttctcactcactaaacaaactgaaattctctgctctgacgagttcatagacgccatcataaataaggtatccattaattttaccacattttcattagatggatgatttttcattgtcagatttgactaaaatccttaaaagttatactaatctaaacaaatctaatattaataaagagaaaattgacatcatggctactaaagctgaggagaggattaatatggaaaactacccgaaaggctctaacaatttggaattaaccaacctgattcaaaatttaaagtctggaacgatcaataccacttaaatgcagtgtaaatattaatttattaaattaaacgaatcataacacattatactatactttacattaataaatgttagagattatttaatgaatcatcaagaaatgggtgacaaaaaatctgtttcaggtaattttggtcccatcctttgtggaatatagtctcatctccccaacggccgttaccttttacagcttcacagcagagattaagtgactttgaggagtatttaggtaatgttttaagtcgatatggcgatttcgatgtggataatcttttaaaccatgataaagcgttcatttgactgctgaaggtaggcttccacagaccctatataaataaatatatgaaatatttggtacctgaattgatctatttgtggtccaaactccagattgtccatgtttcaggtattccattcttccagaagagttacggtggaactgcataacctcgtcaatctgtcttgcttcgaggtccttcaagcttatctcatattttgacccatctctataactggaccagattattatcagaaacatacctaaaagttgctaatggaagttcatattgttcgtggtttaccgaaatatcgatttgaggattcttgacttgaaacacatgtagaagattcctcaaataatatcttaaacctcgactactatgcccagtctcactatacctcagaacaatactcttaagttgccaaatcccatttgttgacatacttttataatataaaaattaatgtaaaaatatctcataatagattaaaatcaagatatttaaaaaaaacaaaatttaaaaaactaatattacaaaaaaataattatgaacgaatataacaaaaaatgtgaataaaaaatattaaaaaaatgtacgttgataaaataatctagaaaaatatgaatttgaagaatgtatataatgtgtaataaaatagttaaaaaaattacttaaaatacacattaatatataaacgtatgtagttggtggtatattgaaacaaccaatatattagaccaaagtatccacaataaatatatttatatttaccaattttaaggattaaatgtgtatttaaacgatacattatttttttatttccccatctatagctcagaatcgtaccccatcattatagaacaagattcttaagatatcgttcatttaatttcctcccgttatacggtctcgatttattttaagcaaaaattggatccttaaattaaaatcataatcattgctgattgttggagacaacaaacaccacaatatctcaaatatcgtaatccaatttttaaaatggacagagcagacgttcaggtaatttttttattcatataacaattatttgcataggttcataaagccttccaaaaacaggcgaacgtgagcattaagaagctccagaagcttggaaataaggctagatactggaaagatgtcggtatgggttttgtaaccccaaaggaggcgaaagagggccactacgtagataagaagtgtccatttaccggaaacgtctccatcaggggaagagttttaaagggtatggtcatctctcacaagatgaagaacaccttggtcatgagggtcaattacctacaatacgttccaaagtacaataggtttgagaagaggcacaagaacgttccttgccacgtttcaccctgttttactgtatctgctggtgatatcgtaactgttggccaatgcagaccactatcaaagaccgtcaggtttaatgttctaaaggtcgagaaaaatgaaatcttcggcaatcctcgcaagcagtttagactcttctaattccttcctctaatatagttatattcgatatatatagtatttttaatatcacattatatatttggcggcctgaaccctttgccgtatctatagaagtattaggattctagaaactaacgtgtttttgctccaaatttcagacaaaattcctttttgtaccttccctgacagagtaaggtccctagcgacacagttgtactgagaaggtgtaaattctccatgaacctcagagagcctgattcccattagattgggaagtaggacatccgagtttatttccttatgcttcctctaaaatacgattaaagttgtgaaaagtaccaataatcttgaaactctgaggaagtcacacggctcaaacttattcaagagtcgccttgaatagaggcataaaagcttaaaactttcttcattcaacttagatttagaggataaaatctcaaacagcctaggatagtcatattctgagctctggtcttgaactgagttcttcaatacattattttgaatagaattcatcaactcaagtgttgataaaccagcgttagtgacaaagattgccaagtcagtcaactaaaaatgttaaaattttgttactgcttattatatattaactggtgaagaaattttagtaaatttaacttacagatttattatccaaatcattgacatatgataataaatggttcaggatgtattcgaatttctatgaaaacattgaatagtaaatgaaaatacacttttatgaatattcaaacccctcgggagcattgatgaaatgtccttcatgattgatgcgatactataaataaggtgtttgacaaaactaactgtattggaggaaagttatatggcgtagaataaaccttatccaaaacctaaacaatattaaatgttaaatctatgtgttagtaaataaacgtaatataatcaattacttgttcaagtagttgataatcgttaattttaagtttattgtacactgaaatggctcttgatataagagttgggtcaactatttctaaatcgaattgtctgagtgtttaagataataccatgtgcgttgaggtaatcaatcagaacatttgttagggtttcaaagtaatttaagtccttgtattttgaaatggcgaaagactcggctgaaattatgcattaaaaattgaaccatcataatatgattaagtttaactggtaatacccaaatcaattagttgctcaaggttaggtgctttgtgtgatgttttaaagtaaaatagtaaatgactacagttgttttgccgttcttttgaatgagaagtgtcataatttaatcttctgaggaactcaagtgatacagaattaaaaagcctgaaattataaaccatacagtttgcaaagccctaaaaattatgaataaaagataaaaatacccttgctacggacgaaattgaagcgttttctgcgatatcaataagagagatgaaccgagtagccagcaaagaaaacaaatatttattaaaaatcctgcaggatgaaaatgcacttgatattctcccaagctgaaatggtgaataatattccattcgttctatcagatgatatgtaaccttctcaatagcatccacacactttaaattccccaaatataaacaaaccgtgggtaaatctgagaattaatgactaatatactctttgtaaataaatacctgtaaagtatcttgatcttttaataaccttctttactataagcttgaatctccagtctgatatatctacattttttatctcacttaaacgttttaaagccagaacatagtgataaagcttcttcctcttatgcctacacgtcaaacatatgtgtaaagaatttaatttttaagaataaaatataattaaaaaatgaaaatataaagagataaaagttattgaaacctgtaataaatccatgattctaaaagtttatttgaagtagtggcagccgctatctttttaggtaaatcccaaaggtaggataaagaatttttggtggattgataagaggccttgtagttaaagtggataggttgagtgttctcaattgatgctggcttagtgtatctttcaacatatctgttccagtttccctttccaacccttttatgaaatcgatagtgtgtaaaatatctctaaaggatgaatgtaaataagaagaaatatatgtaaataaatatgagcattagttattttagtgtgtaatataaccttggaattaaaaattatactgttaaaattgtaacatggaatcattgaaataatgggaaatcaaaaagttgtgaattaaaatcatgaaatatattacaaatgacaaaataatatgtgtatacgattataataatataatttcaatataatatatatgtaataacgatatttggttatttgtgtagtgaaataattttttgcctaataacatattatagtaattattattattgtataatgattaaaatttaacagtataattgtattatagataatgtcgaatattttggaattggataaagcaaggaaggacgttgaactcgaaatggaagctttaatgagttatttaaacagtgaagagtgtaaatatgtgggtttaaatggtcccctagttgacgatgaccagtttcccagaaatgatatagatatttatgaggtcagaaaagcaagaggaagaattatgtgcttaaaaaacgattacgaaaagttaactgaagagatagaaaagcttctacatgaactacacaaacaacatcgaaataaggaagtaaataataaaatgaattcatagtgttttgattccttgtttaataattaaatttatattttaatatattataattagtgtcacaatgaaaataacatatgttataatagtattatatataattagtattttataataattatattatgatgtgtttgaatatgtatctgattaataaatgagttccataaaagtaaaaaaaaaccatggttacatattaaatatgataaatttgtggtgatttagaaaaacaaggctaagaccatttcaatagaggatccgaataaaaaatggtttattgctaaagtaaaaattcatagatgtgttgtatctaatgtacaaagaggtctctacatttttagcagtacccccataatataatttagatacccaattttattttaacatattttatttatttaattgaactgtatatttattttatccatttcattataatataatttatcatatttccagatttttagcataagtgaccttgacctagttccgtgtaaaccagatcactatttcaaagatcatcaatcaaagactgacgactaactccacacactctatttttattctatatcaaccattttatattattgattggtcatatattagtgactggtgttctatattcgacatatttattttatactttccctatacctatattcggatatctaaaccgtaaggtattttcatgactgatttattatctaagttggattttaatttattaaaaacgccaattgctaactttatttataatcggtttattggttatttattttcactccggatctttctagtaaaatgaatgcgtacggccacaggccaccacaatacacttatccaaaggatgagatccatcactttaatccgaacacataccctcaaaatccggtctctcatccagtaaactctatgggcgtctctaatattaattcaaatttccatccaagttataagtatgcgtctagacaccctcatgagtcatctaagttctctaattttgataaagaagtcccatccaaccatgtagaatactcacgtagtggatggtctaacggaaacatagcagaatctcctccagaaaaatactactcagttaacgttcccccggcaaacacacactcctcatatcaaacagaactaaagccggaaacatatgtgcacaagaattttaaaccagaacataacacacaaagtaactgggacaatccagtaaatcagtattctcatgtcagattagctattttcttagaaaactgtagcttgtcgtacgacttactcgagtcggacctgagggagcttttctcctactactcaggagttcactccctgtacatttcaccagattatccagcagcagaacttgtacttacagatccaaacgcatgcaaagcagcctcggctgaccttaacggtgtggtgctcccaggcatcggaaccctgaggtgtgtggtcatggcgacaggccagagcttaaactccctcatgtcaacagcaaacatataccagaattttaataagtcaactagttctaactcgactgcgtctaccgtggacaaccctagcctgagatattcatacaacgaaatgaaaaatcccaacggtattgatttgttaaattatagttacatattttataaagttacacattttgtaaattatattgtttctatctaaacatatataatatgtaggacacactaaagtgattcatccaagaccactggtagtgaataatgtggagcacgttattggaataaccaacagacagaatacgaatcgcctgtgccgtttcgagctgatagagctgttctcgtttgagccggattttgacgtgacggcacagattttggggccaaataacactaacatagagtatattatgaaaaacgctaataacaaggtggacattagtattaaggggaaacctctaaactctgcgtcgcccacggacaggctccatatcacaatctcatccaacgatttctactcctacaacaaggccatatacatgtcagaagatttactgtgttcagtgtgtgaaaagtacgtggagttcgtcagagagagagggaaaatggtctcaagtctagttggcttctgtcgacatgagtacgaagaagactcgtcagggaaacttgactacaagggctccatcgaaaagccaaagacctggctagacaataatacaaagcgatttaatagccaaaagttcaatcattaccgtaacagcttttctaaaaaagtaaatgatcgcagccgaccgatccccccgagccgaaaccctaacttgagaattccagtaaatcccagaaacagggttttcagaaagtgattagtgttcaatttaaatatatgtgtcccaagctgtgttaacatgtagattgtctagttttacacttggattgctgatttccagacgtgttcgttaaaatgaagttaattgtacctgggattataatatttatatagtctgaggtacccaagtgatttaatataaaagattaatccatatttaacacacgattcatttctcagtgtattcctctataattcggactgtaatttttgttttaattggtgtcatacacagatttagtacccaatcataagctttgaccctgtcacgcaatttcattacacctcacaggcctaactcttaatctctaccctatacactactcaaaataaatatagcaagttcacaaatctacatattctattgcgtatcaaccgtgtattaatatgggtgtttattatattagattagtctgaggagtcttcggagtctgggtcgtggtagtagtcacccagaaataaaaagtaagggtgactgggcatgtagtttttaagagcccagttggttccacgctcctgaagaaagtataaaaattttaacttacacttctacgacgctccaagtacctagtcacgggattagtgttctcagccagagcacgctccttctctgcgtttatccactcaatagtgtaacgcttaggcttgattcctaaaaaatatttttaaacagttttaatcaataaattgttaatcataaactaattgacttgataatttactaatttgatcatttacttactgatctattttttttacgtatttaattatctgtgtttttatttgtcgataaatagtgtgtgataccaattaagaacgcgttttgtatcaaaaaggccgcaacgaatacaataaatatgcaaggcaaggctgcgatgtgggtggggaactgaagaagccaggcaacccaggctctgtgctgtcttccgaattcaccaacgagaactgtgtggaagactcccgcgggtctaagagtccagtgttcccagttatacttgtggttgtaaatgggttttacatttctatacttccgtggagttccatcagggttgtattcacgaggcggaggtggaggcaagttatgaataggtgggagtgaagcaaaacatctgacatgtaaagaaggtggagtatgatgtgctatgggaggggcgtgcctaaatattaaagaactgggaatcctggataaaaaacgataaccaaagactgtcataagaatactaatttaaaaatgataaatttaaaattataaaaggtaaactttgcgtttttaataaaaaagtaaattaatggttgtgttgtgaaattaaacttgaaacatagtttataaaggataattattaaaaatatataaattaaggaaaataaaatttattcaaaaatacaataaaagtgtgaaatgaaatttaaataaactgatgtgttatttttgtttcacaggtagagagtagtcgggcaacatcaggatgtgtaaaatacttgaaaataatgaaattacacatcttatgttagacatcagaatagttatgaaaacatttatttactacatttactaaatttacactatcggataattttttcaatggattccatatccaaggctgagtatgcagaagggttattcttctcaagagtcaaaaagaacaaagaaatcatctcaagttgttcttccaatatagagttctggctcttctgatgtgtccaaatcctaattgcctctgaaagaagctgtttggaaagctggaactcaaacatgttcaacacaatcatgcagaaaagagatactataagatcatcgttattgaagcaagctagtttcctataaacttcccttacgatggttcttgacaggggtcttttgtagtattttatcttcatgtttggtatcaagtccttatctatgtctgactcctctctctgttcaaagtggattcttgcaagtccctgtatcaaaagtcttagccctctgggtgccaatgcaggtgttctgaagaaaactgagtgtatatattgcttcaaaatgggattcagctccttcaaacctgatgaaccacttgacgcattactcatctcagaatagacaggattgatgtttttgtcatgtaattgactttgttcaaagttagaattaggtccaaagaaatttgaagaattcaagtggtccatttgagtgaaaagatatgaaatatcacccttattagctgtgttgagagaattaggaaagctaagaacggggtaaattgaatcatactttctgagtggcaggagtattctaaaatccctagggttggggtatatatcaattagcctcgtcattagctcaaattgtgttgatctgtatggtggtgttgactcatatatttttcctggcatttcagttgttattaatgaaattaatcgtttatagtacctgtacaggttatccacagtctccttaggattattctctagcgatagtgaatttgggttcatctctgaaaagccgtcatcagagtatgaaaggtcctgccaaactgacccgggaacaatataattcttaaattcaagagataggatgtgagattgtatcgaccaacagttactaataaagtctgtgaattcaagatgacttaaaatgctatgcttggatatcaactcatctaaaatcacggaaatgctaggaaaatatctcaactttaaaaaagattctccaatccacgatagatacttgaattctgtgttctaaaccatttttaattaatattattattacctttagtttatccttaatgtttgaccaaacatcatctagaaactcagttcctggattaaaacgaaatgaagcgtaaccctttaacagcagtccgattaggtgagacgaataataatctttgtgacctttataactaagatatactctatgaacttcctttggtacgtttattgaattgtatccacaacgtcctaaattttcataagtttcattacaattatatactttagtatatatacaatggatattatacgtatatactacagtacatatacaatgtatactatactgttatggaattgataatacctagagcgtgaattaggagtgggagtctgtacaactctagttcatgtactctggacaaaaccgagtcttctaattggtttaaagctccttgggctgctgcgtcgtagaagagagataggtcgtcaataactaactgcatatcccgcattatcaaatgatcatgtttagaggacaccaattgagctatttcgtaaacccaaactcgatatgtaacatcttgaaatataaacatagttctcaacaacctataatatttgataaatcatgccatggtgaatacatgtatgctaatattagtacataaataagccaatatacctatggaagtaaactccatttaagcacgaaaatctctcaggtagtgagaaaaaacggtgcaatataggttcgacaacttgagaacacccaggtctgttaattcttgttaaaaaatacccgatatcaatgagctcgtatggactgaattcatcaataaatttagagatatcagcaagtatattaaacagcttttcatcagaagtagacttacttacactctaaacaagtaatataataatttaaatatagaaaatattcaaattttagtaataaaaataataagtaacctgtaacattcctaaatatttgagcccgtgtttacttttagaagattgtgacttcccgaacccagaatgggcaattgttttttcataggatatgttatcatattctgatgtatcatcacgtgattcctttctcagttgttcccactgttttcgattacttgaaacctttttaattaactgtgatttatcactttggatgttaaagaatctacttttgattcgatttgtattaagattaagaatgattccataaagccttctatagttttggccgttaaacattttaaatattttacataattaacattgagtttaatgtgtaacagataatacagacagtttgagattaataaaagttaaatgaatataaactcccataataaattgtaaaaacagataaaaatacataaaaaattcaatttctccaatttattcattagtattctcttccccatcataacactaatatattcagaatttttaaatatttttttattctattatttataaatatgcaaactgatttggcttcagttgcacggtcaaacgctgagtcccttttggatacgccttcagctcagtttcaactttcatcgcttccaacactaattgagtttttgaacttccaactcactgatataaatctttacagcttggctaacaatgttgggattttgaagatatatttgctctacccagatgtttctgatgttctggttatacagaagattcttgttttatcgctgactcaggtcccagctcctgattttactgtttgtttatgtcagattccacttcatcttcacaatcaagagcctgtttcaaaggttattaatctccacaactttctacaaaactgtatgtttctcaggttttgggaatctgcaaatttagaactggaatccatgcctggtaagactgttttggacgtttctggtctttctgatagcgttaggaagtttgttttagatgtttcgcctctggtttataaccagatgacagtccctgagttacgtaaactactaaatttccaaactaactcccaagagtttgaacaactcctttcagtctgcggatggtcctttgactcctcatataatagagaagatgaaaattcaggcctttgttactcaacctcgagggaagatagctccaaagtccacaaatctaacgctactcaaaacccgcttgaaaagtacctgaagtctgatcccatgaagtattactatactactcttcacaactaatttaaaatcccacttaacggttaagtcgaatttgtggtaatcgattctacctaattaaacgcagtaatttaactaatataatataacaatatacacattataatgtactataaatgtatacacattacaatacagtataaaagtatacacatcacaatgtactgctataatatacatagctatatacttataatataatgtcatgtataataaaatattaagaaagcattttctcaacagcctttgcaaacagcatcagaactgtggatgactcgcatttaactgtgaatgtgtcccgtgtaaacttggttaaaatggcaagagagtttgtggtaagagcgtaaaagaagtcagaatctgatcctcggtctccgcagagcccaacgccaacgtgatatagtccatagctttgcagggccttaactatacctctgttggcatcagtgttccttgggttactatacttatagtagtagttatggttaaagtccttaggctggagtctcacccacaaggactcaaagtccgaccttgagaccttcgcttcgtgcttgaaaaccacaggcaagtcgtatgatacaaaaaagtagaaaacgtccagattagtcttaattgctacctggatggtgattgggtcatcaggagcagtgtttgatggaatgtggtttggaacgagtgggacttgacactcggcggtcttcccaggttgaaccgtcagaggtgacctaaggggcgaaggtgcaagaccaaaagaattcttgttaaactgcattgctaggagttcgtaaagtgacgaagagttgttaagaagcctcatttgaagtgaaattctatcctcttgtctgcatagaaaggctgtaatttccagtcctaactggccattaacgcctctttgtgaagatgatagaacgacttggggagtacagaagtaacctggtaaacgattcgagaatgtttcctgatcatccacatctggtacgtatggtttatccctggaattcaagaagtaatcattattctgagttaaatcatcatcacttgaatcctgttttggcacgtactttagcttcggctgtgaagaggaaagtgaatctttgaaggcaactgcccatgagggtaagtggtaaactgatgaaactctgcctagattctcaagaaggtcatctagtatgttcttatcaagtgttccttcacccactggtggaagaggtgaaagcaccacttttgacgcgactttggttccggaatccaggagcctcaagtacatgtatgctcgatctctgacatctgggtttcggctctcaattccgcacctatgtataacatgcgatatgaggtcatttttgtcctcagatgacaggtgtaccttcatcgccgctgttaagaggctgagctgaactgagtgtgactcgtcgtggaatgtttccgagaggtttgatatgtactctgaggagtcctcaatctctgacgcatactgacccacgatccaaaccagtgctgctttagcttctgagcggtaaatgtcctcaacgtctgagcacagctggaacagttcatacgagaaaaccttcgggtacgtacggagaatatcacgaagtgctattgtgcattcctcagtaacataatttattttgagcctgagtaggtctgttaatgcgttgacacatgaatttaaagccaactccagccttatacaaagtgtgctaattgctctaattgagcgtctgacaaactcgaggtcaacatccgtggcgtattcgcgcaactcgttcagaataagtgaatagtttgaggaatttgccagctttaccatgatatccagcttttctatattcacgtatagggggtcagtgcacttgcagaaaaacgacctcacctggtcctcaagtaacctcgggtactttgagattacaaccagaattgatcggagtgatacatactggatctctggatcgagtgaagaaagcgttactagtggagctgacagcttcgaccctacaacccttaaatattccttatccgtaaccatattcatcatcttgaccaccaccttgatggctgacattacgacggccgggttaatatgcgagaaacgtggacatactgcgtctatcacctttcttgcatgttcggaatctggtgggttataatataccagcgcgtcaaggatgtatacctgtccccattcgatacactcgtttaacacgcttaaaagcctgtccaacaatgccctatccttgttcagaatagtaacgaagaggttatcgtttgagagttctgatatctccattagtgtagccactgcgttagatatcaccatcgggttctggtctgataacattccctgtaatacttccagcaggccttcctggtgaaccatggttggggatatacctatagtttaaatgacaggtatacacaatatacatagttaattagatacggtaattaacattcataaattacacttatatatattaccatatagtttagatatgcaaattgcggccgttttcctaacataagggtcagggtcattttttgaccttttgagtggctcaattaaatactctgttattgctgttagtctgatatatcccattgtccttattgcaagtgctctaaacatttatctcagattagatgtaatattttagtcatttatgtacaaaaatgtaaataatttgttgaggtgatcaatgtatggaattatataaatttataattgtaaaaatacctaattaagggattgcgatcggttgaatctttacagaacgtattaacagcgaggattgccagttcaggttggactttagcgtagttaattacgtaaagataaacgagcttcttaagttcgatgttattggtttggatacagtttacaacatctggaaatagcgtggaaacatcctttcctgtcgtcattgcgcatataacctttttaattgcttctttttgtttatctttatctgtggtttgaagctcgtgtcggagctcttggagctctgagcgacgattacctttgaaatattttttatccattaaaaaggactacataaataagtaagataattttagaacaaggataaaaaatacaaattttactaatattttacaaaattaaataaaagtcaaagattaataatatatatctatactgtggttttaatacacatcccccatcggaacataggaattggtttttcaaaatttttcaaggtttgactctacataataaatatcaacatcaatcctaaaattttattatagaatcatcacgttgaaatgaaatcataatgacctaagaatgtactgttaatataatatgtaaagggattgtctgataaacattaggttagaagattattcaacgcttcgaactatatctgaatctccagcgtctagaatagccatacatcctactctaaagtgttttccacaggcagttcccaggtcattattatctccggtatagtgatggactccgcatttggccaacattgcataatactcgatttcagatcttctcaggggtggacagttgttactcaatatgaccaaaagagctaaaaaaagattatttatggataattttaatacctttcccatttctcaatgtagccttcgttgatttaaatcctaaacaaacctttcctgatttcatcaccagttggagtctatggttgacgttttcaaccaatttagactttgattttttacccattattatactttattattaaattaatattgtgatgcaatattaaattgtggtgtatctcaggtaacttacgatattatacccagaatgtaaaataatatataaattaaggtccaaatctaataataaaattaaactgatattgtttttaatcaataatatcacttatatttccccatcacattttaaccttccccatggaatcttatgtgttaaaaaacgcctttacgaataatattaacaaataaaatataactaatttgccttaagacattaagtttcaattttctattactaattttatttaatttcttaatataatacacaaatatagatacattataataattttgcagatatttagcaattaaattattattttcttgaaaatttaaacattttctttttagctttcttctttaattcaatttcatttggttctacttccgtatcagagaattttgctgcctctaccatcttctgctgttcctgtaaaaggacatttagcccgtgtttaacctccatcctctttatctcattaagtctctcctcttcgttattatatttcctatgaaccgttactctaccgctattatcactgtcacccgtcctgttactgccagtgttactaatatcagtattacttgtattactagtggtggtgttcccggtcgtgtttgcactgctggtatagttactatcactggttgtattgatattgctgttattgacactacttgaagtattatttccttcagcagatcgttgggttgctttgattatgatattcccggtttgagagttgggtgatttttgagtattgatcaatgagaggttgttttggttattttcaggcgagggttgttgtggcataggattattagctccataaccaaccacactaggaactccaaagtgctcctgaggtcccttgctctttttactttgaaccaagtcaacagccttgtgaacgtcaaaggtattaattatatctgagggtgttcgatttgcgcctgaacctatgtgatcatttggagttgaaatgttaattttaggtgaatttgtaaacttaaaatttgaaactggattcctttgactggaaacgggtatagaagtcttgagatcgtatgttctcatatcaggtttattctcatacgtgtggtctaaatttctaaccccgattggtctattgttgacgttagtgaaaactttagaagtgaagccgggaatagtgtttttattttctaaatcatccaaatctgaatcatagtctattctaaagttgttcaagtgaattggagtgttgtaatcggtggttgtgtgtctataaagcctgtcgtaggaatagtctgtagtacaagcattatgtctggtatctaatcctttgtttagaccataaacatcttgatatgagtatattttgtcttggttttctcttagattattataaaccgggttataatggtcacccattagaccatagttggggttaaatgtgtcacgaaaattcgccatatgtctgcaatccttagtcatccgatcatgggtactgcaaggatagggacatttgtatcgagtatgagcacttgatttattgcagtgggggtcacaatttcggtcataaggattagcctcatcatacatgctagccatagcagccttaatatcattaatatgtgatgtgtccttgtttttagagtcattttgtttccttgacttaatcagtccttctacattatctgtgaatgagctacagacgaacagaactcctgcaccagtgaacctgaaaaccttacttagagccaaacctattgaagcaatcccgtcacataattctgactttgatagatcataataagttgaatttgttccatgttcctcagatttattctttgtttcacgggaaactgtggtttttgtagtctgataaaccttgttatttggtttaacaacttcgatagtgttttcattatcagtctgtttacgattagcatcatccttttgtttcatttgggtatcacgtttatttttaacctgagtttggtccttatctaaattatccaaaagaccctttttcatcttctcatagtacataaaatttcttaaaaagtcagggtcgttagtttcgaatggagcaaaatctttggtatcaattgatgacatcctttctagatattcacagttagtagtaaaagactcgttaaaatttgcagatattagggaatcataattcgttcgactatttctgttatttacaccagttagcttgtttggtattccaattcttttaattccattaactgggattttaactcctgaaacaggctgttgttcatactttgtactataacttggattatatttaaggtgatttgggctaggtttcccctctacccttctttgaaaggtggaataataggcatttttaccaagtcgatgggaatcagaaacactattactcagcctaattgttgaaatgggctcatgtgatatgttatattcggttgcgtatttaggtgaagtgttcttgagtccttcaaacgcaagttgtttggagttatcaacaaaattacgtcttgagttgacgttcccagctagttgagtgtttggttgataaggttcaggcaaacatatcccagtcattataaaacgtgttgcgataatttaattatttttaagctgtaaaaacaaagtaaacaacattttattacaagtggatcatttatcattaataaaaatcgtcaagggtagattattatgttttactaattttaaccttaaaataatgaaaacataatcaattgcgatttaacttttacaaaatgtgtaagattctaggctttagtatggaatcttacaacttgttatcgattactgattttgtatatttttttaataatgatcttgttaatttcatagtatttaatatttattttaatatttacatgtatttggtatgaaattttcattagggaatttaaaagtggtcttttgatcttggcgaaaatttatttatatttggctcgaaaataaacaaatttctaattattttattatatttatattatggaataatataataaatatatttaaggctagagattagaaattactgtttatcgtgtaatctgtgatacaagaggtacattttggcgatgttgtcaaaacagagagagttgatatctttagtgtgagttgtacactcgttactcatgataattgttgatagttgtgatggagcttcaatctttttaaggagattattgtcgaactcaggcatgggcagaagcggttcaccctttagtttacactgctcattctctaacctccttctttccaagagttgcttctgctgctggacaagcttagtatagtctcgttgatatcttataaacttttcctggttgtcgcagagtgcctccagtgactgtgataaaaattctaaattcttttccaaatagttgttatggtaagcgtctaacacgtcaaagacatatgtgttctgtattaagctatcagaaaaatactgggtaagaaatacctctgacaaaattgagtttttgataacaattgggacctcctcaagaatctcagttcccttgagggcgttgaacttcctaacgtcggggtcagagctgtgataaactgatagtaactggtcagatgcacggtaggccttgaaggagacctctccagttgtagatacagggtcgaagccgagcattatggctttatccacaacgtcttgataaatgaccaggttatcgattgcatctttagattgaaggtccccaaaatttactgtctggtaccatcctattgcaaaacagtcaactctcacatcatgtaccaattcggtcataagctcctggtatttaacaaactcttcgtcggccttttcttcgatttcattctcggctaaggtgttagtgttcttgtcttttattattgagttataaatatctcgtttttgagggtaagggaaacagtttgtcacttcaagtctgtctccaaaatcaaggcccagtagttgtccattaacgggaacagggtagttatctttacagtgtttgattgctttaataagaaccaaactatcaatttctacgtaagactgcgttctctgtactggattgttagtgttagtatagtctgaaagggttgaagactttccgacgaggctgcggtgaggtttagtgttaacaaaatccatttcaataaaaataaaaataaactaataaactacacattaattaataattgattaataatatttatttgttaataaataaacctctatttttctatgggggttgattccataaattattactattttcctttattttattttaaattcgaatcttcacatatttattgatatttaattcgttcattatttttaaatttaattgattcgattcaattaaaatttaacaaatattacacatcgcgaagattctatatattatgattaaatcctatgataattattctcctccacattcttactctgattatgaagaagtatttttatttggtttaaattttaaatttagtcactaaccgaatcaattcatcaatcactggaaaatgactattcttacttggatttttacaatgagagtactgattcattagttattatacctttaaataatatttatataaagaatttatatatttaattatatatctacgtttttcttcattttatataatttattggatttttatcataatttaataggtgataaggaattgtcatctgaacacataaaattgttgtctttgaatcattatattaatcattatttgacatatattgttgaagatgagcttgtcttcttcttattccaggtacaatactgtttaaatttatgctgaagattatataatagtctttattaatatattttatacattatatataactctctcataggctgaactttttttaaatttgagaaggtatactaactcactttcagcttgtttttgcttcgaggccttcggcggttcttccgttgtatcaaaatgtatatcactagtagatttgtatcaaatgaattatacaaaaaatttcaaaaatttaaaagagtgagttataattctataacattttacagggaaataacgaagttgaagctagacaacatttcacagacccttcgtaaaaacgttgtaggtacaatacaagtatcagctctcattccagattttgtaaactgtattaataatttgaaaaatcggaaaaaacaatgaatttatgttataaaaactcagtatatattattaaaatgttgagtattaatagagttgagtaagtcttattctctaagcgcaaaaaactaatgaaataaacataaattattaaagaaattctcttgaaaagtatgaaaactgatgataactgataaaataattaaatctatagaacaataatagaactgacgggatcaatattttaagaaattaaaaagtgattaagtaattatatttatttttaatttgtgaataatgaagatttttaatgtactaataacaattatatactaaattctcgaaaaaagatttctcgagtaatatgggggagaattggaagaaagaacattaaaaaaataacataaatcacttcaaatctaatgtaatcttattaattataagtgaattatatataaattaatataaaaataaatggaagaagatgataactgtacgattcgtaaatatgagaatacgatgaacaagtcagataagatctgaaaatgattaacggatagatctaaatcttatatctaaatatagacattaaaataattttatttgtaataatgttgtagattttttacactcttgttatttcgtagattttttacacatgttatttttatgtttaataattacaaatctaacgtttttagtttagttaataacatttgtattttaattctaacttctatatgttctattcacacgacataatcttatttcgattcattttaaaaagatctgtgagtatcaattaaaacctaaatagttggtactagatctttgttaatattttataaaatacaggaaaagataaaatcctaaattactaatcatcaatctggattaataacagcatttgataatcttaaacattttttaaaatgagtagctcaaaaaaaagaaaagttccagcaagggaaatcagacttgatccatcttctgcccaaaaagtgcaacgactaccaggaatgccatttatagatcctccgacagtcagaaatgctctaattcatactacattacttaatgaattagatcaacagattggatttcgtgtaataagggatcggaacctacctaatcgtgaagaaacattgactgtaataccaacacgtccattcgttaaattctattgggataatatttgtgtgtgggactacaacaaaagacctaatcatggcctaggagttagtatcgattacaacgtacccagaaacaaagttattgttaattgtgcagataattactcagacactgttaataaaattaatagtgaattggagcttttaactacgagagatggcaattatgtaaatatccaccaggatcaccatgataactacaaaaaaggaagtataggaataactgaactttacgagggatcaaatcttgaaattgttaattggagagatgaaagagtttatactaaacgaggtggtgaaaaagcgcttagagttgtgtttaacaaaaaaaaaaatggaaatattagtttttttagacaaaaagttatattattttttaaggagtaacaatatatggactgaaaaagctatagattatccgaattttgttcacttctatacatttcctggcagaaacttcgacttggcaaattcagaagcacaaactgccgccgatgttgactttttgggatcaaaaccatgcgaacgtggtgaaattgagcctgttgagggtatttgggatggcatatattacacagacactgaaagattgaacaaggaagttattagaccactatttatgaatttgtctagggaagaaatacgaaatatgcattcacttctaggaccatatgagacgtcaccttgtaactatgatatagaatttggtgtacacattacatttaggtataaattcctacaaaaagataaaactaatgcaataaaagtttttcataaactgataccattgataagtagttatggtagtcttataaaattcgagattgatttacatagtaaaattataactatcctggcacagagaattaagcgtgaattctactatgattattttgacccaactacaagatctaacagttctcaaaggcgagtaccaaggaacaataacaacctaaaataccgtaatcgtcgtaaaacaaatattgaaagacagaatgtaaaaattaatgaactagaaagagatttgttaaaccgtggaagataatttaattttttcacatattatggttgttgattctattacttaaattctcaaagagcttttaacatatacaatatcccattatttagactaagaacggcaaagggaaatgatcacagttttaattatttctattatttcataagatttataatatattttatatattattattaaaataaatgtatgtgataagttcaagttcacatccacttatgaaaaattattgagttatgatttatccttaataaacaaaacgagccaaataaacaagtgtaataaatgataaaaaagaagttttggtaggttttaaaatgtgatatccaaatgttaagtttataatgaaattaatgtaatgagaagatattgtttttaaacaaattaaaatgacaagtaaattgtctaacatattaattaataatcttgtaaaaaatatatattgaacaaatcgtgaagactatatcataaaaataatattaaacatgtggaaaatcagataaaatatgtgtttaatagcaaataggacaaattaccaaattataaatactgataaatcaggatcacaaaataaaaccccagtatagaaatatatttttcgattttaattatgtaattaacattaaattttataatgtcaaagaataattataatttatctaaattaactttttatgataagaaaaaaattttggatcctccagatgtttcagacattatagtcttggatattaacaatgaagacaaaagtgacaaatattcatattttagcagaaatgattataaagaatacgctatatgtaccgggaattatataaataaattaaaacagggtgactgtgttatttgggaatcttgtaacaagaatgattgttcacatctagtattattttacgatggtgatgataagtatattgtaatagttccttatgaagggaatttaattcttttacacaaatcttctgatggttcttggattaatataaaaactaaagtcgatttgaacaaattagaaatgttccaaaaagatggtctgactttatttataggcttttttcactttgatctacaaatgtataatttaaaatttatctttgatagtctttgtgaagtcgttatttatgagcgtaggttaatttataaccattgtgatagaccaatacatggtcacccatactctttgtgtttcaatttattggatggaactatttcaattcacttaactgatgagtcaatactaacttttcaaaatataaagacggaattacctgaaataacaaattttcctaattctgatcgaaatgatccttataactcttcacattttaagcctaatcatcttgacgtttatgaatgggaggaactatatgagcgactaattcgatacggctttaaaagaaaagatatttgttcattttttaaaaattttcatgatcaatctattgacatcgaatctgatcatgctattattgacgctaatttgattatgtcgaccgacaaatatgtaacgtattgctcaccgtcaaaaaagagctttcactgtagacaaggatattattttggtaaaataataaatcgttcactattttgtgtaacttcggatttacctgagtatgattatattaaaataacaatacgtaatttaggttatttatcaactgaaaatagtgatcttgaatataattacaaatatacagattttacttgttcaataaagccagatataacaaggttgaagttctacaacatgaaagatattgaaatcacttctgatggttttgatgtcacacatgacgattttttttatgcaattaggttcaaaactgagttatatagggttgtctatgatggcaaggagtactggaattataatagtgataaaagcaatggatttcctaacaaaatctacttcacggactacaataatgatatgaacgtttgtttcaatgatggcaaaatcgtaaaggtaaagattaaggttcactttttaaaattatatacaactgacgagtttggtaatactattccgataagcgagaactactataaaactacaaagtcaccagggcgcatactattatataaatttaaggaaggtgttaagtgtactgagatatggcattatgatgtagaacttgtatggaagcacaagcagggtgacccttatccgatttcaatttattataataatgaattccatgaagcaagtataagatttgaaaaatacttcattatttcaatgagaggccgccataacacgacttgggataccctcttatttccaattccgagacctttaaaactattccaacttaatgggcatggtgaaactgtagaattgaatgacaaacactattttttaacctgtgatcacttcggagacttccgatataaaatgaataaaaacgttgaatgcgttgagataaaactaggcgatttaagtctttggagacaccaaccatcagaccagtatccacacacagtcgcttatttacttttcccctgctatattagaggattttgtaaaactttaaacattaaatttgaaagaaaaagaggaatttggaatagtaaaatccatgttcttccatagtgataaacaatttgtacttaatattctatcccaatttataatcatatgcatttagtttcttgaaacatttaacagtatattgttttaatattaattcaacatttttaatggagaattaatttctatattgtattagtgtgaataattgtgtatttaataatttagtatattaatttttgacaataacaacttctactttacagtttcggattgagaattcctctgaatgaaacttattagcaacatttagattatttgtgacaactgcattcttttttagtatttttttaagactttcagtttgagactcgagcatattgaaaagctcgaggtcatcagtatatatgtacacagtgatgtcgtcgtcaattgataatccgagctccttcctcatcttttgaactctgttggcaacttccctagttaaagccttgtattccaatgtgtcatcctttgtcaattcgagaattacagtgaggttgttgtcggactctgcgtcgaaattattattatccaacttttctggattaatttttctagtaataacaacatcatcaattgagatggagtggcccaaaagcagcagtggctctctctccaacaatttaatctgagactcgtccagatttcggactgcatcagaaacatgcttcatatcctttccgactctagcgcccagaatcctaaagttaggcatggcgttgagagttattagtgaagtgtcagtagacaacacgacatccagcacattgatttcatccttaatgagctggagtagctcctccattgaggataggagctctacatcttggtgaattaccgtaagtttcctcagcggaaacttgagagatatctttttacgctcccttattgtcctggagagaagtataatactctgcatcacctctatccttctcatgagttccttgtcaaagctcattgttgactttggtagcttctcataatgaatactttccatccccccagaaaatctcctcaggttaaggtatatcatctctgatgtgaatggcgcgaacatactcattaggtggttaaaagtcttcagtgaagtaaacagtgactgcaatgagaccacacattcctcatcaccaaaggtgcccctcatcctctcgcggtttatccttatgtacctattatcacaatattaacaaaatattaaatatatatatttctatattaattatcaattcatatatatataatagaatactatatgggtatgaacataccagtttgtaagttgttccaagaatgaaaggagctttggcatgacattgtagagtttgtaattttccatttcatgatgaacagaatagatgagttcctgtgtaattgtgttaatccatctgtccataacacaactagacttgaaaggtgcttcagggtcaggcacgaacttcattttgtgtgtaacctcgtaccttgtaacctcctgaactaggaacctgtaagagtggaaccaggggagaataacatcctttagcacgtttcttactgaatccgttgagaatctcactggttccgccttcactgctggggatgatattagaaacaacctaagtgagtctgctccaaactggtttatgatatctagtgggtctgggtaattcttaagccttttggacatctttttaccatcacttgccaatattagaccgttcactattacgtttttgaatggggatttattgaagagtagtgttgacaggaccatcagtgtgtagaaccaacctctagtctggtccagaccttcagctatgaaattagctgggaagtgctggtctagagagtctttgttttcgaaagggtagtgtatctttgccagcggcattgatccactttcataccagcagtcgaatatctctggtattctcctcagcgggggatactctggtcctctcggatctggtatcaataggtgatcaacgttgtgacggtgtaagtcattaaccttttctcccgtataattctccaactcttcaatgcttcctaaattacaatttattgacaaccattttaaaatatatatttttatacattaatgttattttaattacactattattatctatatgattttattagaaatatactataatcaaataattatagtattgtaaaatagaggggaaaccatacctatgcagacgatttgggtgtagtcttcgctagtccatagtggtattggtgtgccccaaaatcggttcctgctaatgcaccagtctctggcctcagagacccagttgtggaacctcttgtctctaacaaactttggcgtccagttagtctgcatactcgagtttaagatgtcctgtctgaactctgatactttgatgaaccagcagtttacggccttgtaaatgagtggggtgtcactcctccagcagaacgggtaggagtgaacaatagttccagagtgtaccagctggtccttggccttaagcatcttcttgatgacattatctgcatccttaatgtacaaaccagccaagtctcctgttgaaccaacaaagataccagactcgttgatcagctctggaaggggtccgtccaatattctaaaaattcgtcattattgtactcaaataattatctatttccgaaagcttataatcttacttgtagttcatgcagactctgtaatcatcttcaccatagtatggagcgcagtggactatgcccgtaccactttctgatgtcaccattttgtctgataccaccacatatgctcttgacatcagttcttcggagaagtttgggtgatttgcgaagaagtcgaacagtggctcatacttctttccgacgagttccctaccgaataacgagccgagcttctcgaagctttcgtcaatgtttgctccaagtgcgttacagaaatactccagcctacattcagccaccacataggttttgttattctttttgtacttgactttgaggtagttgaagtctccgtttacgcagagcgccatgtttgatggtaaagtccatggcgttgttgtccacgccaccaactcaaattcttcatccaaacacctatttattaaattattaaatatatattgtatatttatatcagtatctataaatatatatatatatgttaatggaggatatctgataatatttgtaaaacatacttgaaagaaacaaaaagtgaggggtctgtaaccattttataatttaggttagactcgaagtttgaaacaggtgtgttacaagaaagtgaatatggcatgacgttgaatcctctgtagacgagattcttctgatacagttgcttgaatatccaccaaagtgtttccatatagggtgtgtttagtgttttgtaatcattttcaaagtctatccacctccctgttctggatactatatgcttccattcgttagagtacttcattacaattgacctattattacatgtatactgcttcacataatatgtattggagttacctgcacttttcgttataaacatctattcccaatttgtagacatcggacgagtgtttaatattgtacatattgtctatttcgtgctctataggaagtccgtgacaatcccaaccaaatctcctttctacgtgatggcctgtttggtatgcatatcttgtcacaacgtcctaaagattccattagaaaatatacttataacataataaaataagttataatatggttataatgtgttacaatacatagtaatttaatggagtaatatttgtatacttgtaaataataatgcttaagaataatgtcaatattaccttaatggaaccggcaagtatatgaccgtaatgaggcaggccggtggcgaaaggaggtccatcataaaagatgaatgacggagatccttcggacagtttcatacagttattgaaaacatttatatcgtcccaatacttgaggattttttcctcctccttagggaaatcgactttgtccgaaactaaacggtttataagttggaaggtctttaaagaaaattacctttatcgaacgtaggatgaaattcgtctaaagatgccatttctattgatttatctttcgaggttatatatcctttatttgacaaaaacaaaccatttgatattttactacaagacagttttaatgttgattttttaaattttaaaactacactattaatttttttgagactataatgataacaacaaagcattaaacattatgaattatctcctgtacccttactgacgccacacaacttgtaagtctacacgattttggccatttatcgtttttatgtattataattgttgataaaacaatggagataattgttatactttttattttaatctataatgtgtgttctataaagattgatttaaaccgtctttccacaggattcatcaactatggaatcaattctggatttggcacaagaactcacacgacttccatttataaattaaacaaacataaaaataaacctattttcagcctggaatccaacgacgaatcaagttcccccggtttcagaattggtaccttccacacaaattattactttttaggtgatcttccacaccttggacaaaacaactttaaattgagaggaattaaattagaaaacagtgttgttccacttagtgactacgttcttatagttaaaagtgatgctgttgatgtgactcagtcaggagtatacctgggcacaaaggtatttatttttattatttgtccttatatttaaatattctatatagtttttaatatctgttatatatttttctaattttttcataatttaacaaccaaatcgttaattgtatttttgctgattatttgatagaaaaccagagattttatcggacgagtattggcagttggtcctggaaggttaaataaaaccacagggttagtttaatttatatatttttgcgctaaggctgagccttgcagtattaatttctgctttggggtatgattaatagcgctaaactgattggtccaatcatatattattattttaatattttttggaccgaacaacgatgtacatccgacattaatagataatactagttatcagaatgaacacaattattatttattagagtaaccacaccgttgagtgtaagtgttggagatacagtattattcgactctccatatgagagtatagatgtaagttgtgagaattaataactgatactgtagctaaagtataatgataagccttgtgcgttggtccgtgaggagcaaatttttgctcgattaaatgtaggaacgcacgaattggataacagaataacatacgacaaggttgtgccactatttgataggtaaaataaatcaatagataaatgagtaacaaattaataggatgctggttcgagtgcttgaaagccctaaaagaacagaaagtggactggttatatcaagttcaaacacaagagatgaggtagtaaaggccaaaatcgtatcgttaggaccaggaagttacacagagagtggtaaactagtgccaattgttggactgtcagttggcgacactgtgttgtacagacacaacgagtatgattctggagaattcacctctaacaatgtaaattatgcttttgtaagaagggatgcagttttaggaaaattgtgaaaaatatttttaaattttaatctaatccctcattacacaacaattaacaaacacaacacatatacatcaaacaacatattttatattgttttatgtattaatttctgtattttatttcaaaatgtcagatgatgagtcaagttttggctcctcagagaatcaggatgaagattcttatcttacatcgcaatctgacaccgatatagttgatgataacaaactatcgcaaaattatggagcagaattatactcaatgctcgattcagaagagcaaaaacaaatttccaaacgtaattcaaccatgagagtatctttaacattttaaaacagtgtttcaggataaagctaagtctttaaataaaacaaaagcaccggatttgtcaaaaaaggaacttccaggactatatattaatatatctaccgaaaatgatccgcagaaattaaaaacaaagtcgaaaggttccatttattattttacattaattttatgttcaaatgtaaatattttttagaccagaaaacacttagaaacattcttgacctttacaaactccactcgtttctgaaaactgccagacttccatttatcattttacttgacgttgagcttcaccgtctcctgcagtggcttacacctactgaagaagagaaattagctaaagaacaggttaattctacattgactcttcattatctatcttaaaagtgatataaatataatcaactgaatattacaatttaaaatgtttaacttttctgtttattacttttgttttaggttttactgcagttggagatagttgttaacgctctgttccctcatggtaaactgaaggttttcggatcctgtatgttcaatttaattaatccgttataattaatcttagatgtcactggtctatcattacctggagctgatatcgacgtgtgcattcagtctgatggagatcaactatgcattttgaatatggttgtttatgcgctcaataggctgggactagttcattcgtttgagtgtatctataatacgacagtccctgtagtcaaactagtagacaagaggacaggtaattttaactcaaactacgagtgtgttaggtgttagactagatttgagtgtatataatgattctgctttcaagaccaccaaattcatacaggaaatggtatatttgagtataaacatatcatcttagtgccttaagtacaagtatatgcagcctctgatactcttgataaagctattcctacagtctagaagccttggagacacatactttggaggagtgggatcttacctgctgtactgtatggtcctgagttttctacagctccacaactcgagcacaaataacacattcgatgataaaaactctctagctacactcttcatggacttcttctactactggggatttgttagggactataaacagtttaccacatcgtaagttaagattcgttaatcatttttagagtacgcggactaggccatgtttaccctaggacgctaaggaaagataaatctgacaacactttcagctgcgaaaatcctcttgtatcatcacttccacattatatactaattataaaatgtttaggataactctgttgatattggagctaattcgttcaatatgcatagtgttatttcttcattccaaaacgcatttatggtattcttgataatatattatactagtatgattttctaaataagacgtgtaacaggtgctgaagagtattgagtcaaacgtgcccaattggtttccaagcaaggaggtgtcatttgagatgaacttttcaacaatcctcgagtcattatatgatgttagtcatccaattttccaatacaggaacagtaaaagggcctcaaatattcgtaacgagttcttcaatgaaaactctaaaacgatgaagtcttcattagaaaatgtaataaaacacctaaggaagacgtttgatggtagtaaaactaacaccttcaatgctcagaggcatttaatagagtcgttatcaattgcaagtgatgatgtaaacattggagaagaaaatccattttacattgtagcagaggccgttggcagagacaaaactaaacttaaattttaatataatcacctaaaaaattattttgtggttattccacttgtaatattcaaaatccatttatacacattatgaaaaacagtgaatgtacagtataaataacagtaaaacctgaaaactgtatatattattggtatcagattaaatattttttagcagcctggtgaactttacttttaaaattacttgaatctagactagtattaaagacgtaaagaggattcatgatctgtttcgagtagagttcatgaacttccctgaaaaagtacctgatattgtcagaagaaggaggctgaggatctacaggactagtggtagatgaatatattacaaaatcgtttgaggaagggttatgtgaacgagtaacaagtagaaagtttgcatgagagcatgtaacataggctgaaactgagagaaaatcaaaagcgtcaacctgttttaaaaatatattagggtttgtccaaatgatatcttcaataacatcgagagattgatgggccacaaatgatgaaaggtgaggagggtctgaccttctacctggtgttgaaaggtcctcaattagaagaggtttgtcgtcttttccgacaattataaacaccaaaattttagaataaggttccgaatcagtatttgaaaccttttcctcctcaggctcatccataataaaataattctaaacctaacacatcatacataaatataacaccatcaataatatatcaaagtggcaaatatttattatttaatgaaaattagctacaaattaattaataaatatgtgtgaaattgatgtgtatataaataatgacaaaattataatttttttggtgggaaaggcttctttagtaatttgggggcaataactaagggtacaaggggtttttctggtagtttttccttcacttctggaacagattctacttgaactttaggaacaagcttagctggaggaggagtcactctagcctttgctaacacatttgaatcaccggtttttgacacatctgacccactagacttcgttaacacactcgaatcggtgggttttgggtcaagattggtagtgataggttttggttcatccttccttggagtgctaacatcttcctttagtacagtttctttagtgttttcaaccagagtattgttatcttcctgtttctggtccacttccaatccacctgtaggagatttgttataaggatttatctcaataaaaccggactttttacgttgcaaaggactaacagttggatccaccttctcagtcattgagtcctttgataaaacccttgtgctgagcttctttacaattagttcctttaaagacgttttttcctttttatcaaccttttcggagctttcagacctgaccaccttttcaacattttcatccttatcgacagtttcttgttttacatcatctacattgacttcattgggatcagatacattagtaggctcagtctttgaaccgtcacgtttaagagaaacctgtttctttccagaaaatagtagactcagttttgaaacgcttgacttctctttctggccagtttcctcaggtttagatttctcgtccttactagtgggttgagatttttgttgagcttttggaacattagagtttagattttttgaaagaggcgacgttttcgggttaaagaggggtttcctaattgtacgattagactttggctcaaacgatttacctgtgccactaggttcatcagacttagtcgtttcttgaacttttacctccgtctgagctttagtaggtaacttgttcaaaggctcaacgaccttatctgaaccagtattacttgtggtggctccggtagtcttcaagggtgcgctatcagctctggttaattcatcagtttttgaagaaaagtttacagcaggaagcttagcattgttaggaattggaaggacagatacgaccaagtcgccacaggttactccatttgaatcgagaactttccaaagctcataagactttagagttttatctgaaatcaagcttacttcagcacttccaacgaagaagctatcagcataaacatccaaaacgagttttggaaccacgtttggaacctttggaggaagtttagggttctccatcaagtagttgaactcgtaaaccttggaggcgttatccataggtttcacctgcaaagtggctaatctggatttctcagtgtccttgagagccttatcttcgttgtcgtacctgaagaatacgctaaaagtcttaatgtcagtgctcggtaaatcgcacatcagcattagcctatgcaccttcacagataaacctgttaaagcagccttttcaggaaccgtgttggtcataggcttcattacctcattcatcgtcacctcaattccttcatactgagtaagaacaccgtaaagggcgttgtacagagtgttgagtctgacgtctaggtccctacaagggaaaaggtactctaaacataacttgataaaggcgacacgactgtatccctgaataacagtgcaactgccgattcctacaaaggcctgtatcagagtgtccatctggttatataaaacgtcaattctgtccagagtttccttcaacttaaggggttgatctaccatcgattttagcttcctttctaagcaatgaaacctgttgtttgcctcttccagcttctgtttgtagttcagaagctcctgctctaacctatagcaattctcctcagatttcttcctgaactccctttctctgttgtagagaaggaaatagttcctcaaactcgtgtcaagctcaaccaaagtgtgttccagtacctcaggatcaggcctcctcctgaaatacacaccgtccttggtcagaacatcacgttccggcactttcaggttattctgctttacaaaaagctggtcccataaattatttagagaggggaccgtcgtcattgtttacttactacatttcaattttaataaacgtaaattattcaagtactcacaaatcagcgatactcaaatgaaaagtgagaacaggataaaataaaacatatataaaacaacaaattaaaatataaatattaagagttaaaataaaacgataacgttttattaaaagagatatctaagcacctgtgggcacttcagcgagcgctgataaaaccaatttctaatgacttttatacatttttaaaattgtctaaattctaaagtaaattagttttaacaaataataatcaaatgtgtataacaattttggtgattttataaaatcaacacatatacatatttttgaattccttaacattattaaaattcttaagttacgtattcgattataaaattattttaaaatatataaaattaaatttatttttaataatattttatttatagacatttgaatagtgttatacacatgcaattatctctccctaacctttatatattatatgtattaatgttttaatttgtaatttttaaaaatagtaattgattttatacctgtgtaaataatttgttttttctaaatcaatgcttttgactagattctatttcacctctgtacaaaattgtagttattcgtataagaatcttgataaactatcattaaaagtatattatctgcaagaactttcgacgattctacagtctaggaagaatgatccttcaccttacaatgaaagtttgaagaacaaccctgtatacaacgttgatcaacacacatttaacaaatatgatattactcaacttactcacgatgtaaacaaatcaataaatgatcttagcccatcacaactcctttcaacggccatttcatacactaagctgtatggagttggcaaaaaggagtggaaacgcctatgctattcttctttgaaacatatttatgataactgttacaatattaacgccatttcctttagtcaaatcgcaatgattctatactcatacgcatctaagtttaccaacgaaatgccagttacaaataaactgctcaaggcttgtgtgaaatcaacaggtagccttaacgagcgtgacatatcaatgattctttactatatgagaagaacaaagtgtattccaaaaacactaaacacgccccaagactttaaaaatgcacagattcttagatcgattgcattatgtttatcaaaagaaggagggaataagttagtcaagatgacacccatgggcctagtttcgatagtttacaattttacccagatgggcatgattccgtggtcacttatataccactcgtgtaacttaattaagaaaaaatcacggtatcttgactccaaatcaatagggttccactctcgatcactttcgtcactaaatattagagataaaaaagcattagattcatttgtttcaacattggaaaacaggaccaaaataccaatacagaccattagctcattattgtattcacttgctaaactaaagtatagaccaaaggcgtctttgttgcctgttttgaattacactaagcagtatgataatttatttttattcattttttaggtcgatttttctatttgatgatagggacttggcacttttagtatattcattaggacaactaggaatcaaatatgatggactgtttgactcaatttcagagttcattaaggtataacttaaatcttactaataatttaatactggtttaaatgaatatatagaagaggattgattaccaatcacctcaacatttatctatgtttataagaggatactcaaagttagggatttacgatgagtcgttagttcagtcaataatgagccatgtaattcagttgctggtaaatcttattaatttttacattatttagactggatttagcgtgactcagcttgtatctgtactcgacagtttagtggttttaggttattttaacgattcagtttactcacaacttcttgagcatttttgcacatttcattcagtaaatgattttttatttattacggtttaggaagatttgcccgaatattccataaaccagcttaacaggataatgtacagcactaaacttgaagtaagttaacacattgtattaaaattttaaacattgttgatatatgtttttttagcatcctgagttcatatccaaggctcctacttacatatcatccttgtttgatcaatatcaaggagtattcatgattagagaactcaaggtacagtatgtaaagttaggaattttcaggattcgtcggactctctattcagatgcttgaaacaactaaacgttgattatgaaattgggcaaaaggctggaccgtacgtgccagacgctattattgatgggtacaaaaatgttagtttattattatattcaggaaaatttgtattgacattgtatcaaagggatcagtgtgtccaattacaggttcatttttgggatcagtgaatatggctgaaaggcacatgaatattctaggatacgagtatataaagatacctaagcaagaatggtagtagagtctaattataatacattatagggttaagaaaagcgattcacagagaataaccctgttaaaacaactgctaagcagtaagccgtatggtaaatttgtctaaatgagtatatattaattatataattgactaacatatcttttcatcctctccaaaaactgaacaggggaacccaagtgatttcagagaaccttttagaacacctgaaataaaggacaagtaatactgtttgtaactctgaattgaaggcttttcagttggcttgttatgattagaatagttgaactccaaattatccatccagtaaaggtcctcggaaaatacaacataaacaccctggaaattaaaaaaaatttgtaaatatacggtttacctggctattggactggagccttttagcctgcttgccgaataagtaagtccagagttgacgacatataaaaaccatgcatttattagggtcgtgaatgggacccatggtgagagtgagccttaaatattaaatttgttggttaaataataccttgaaactatttttgagcctaaatgatatccatgctcctctagagattcgtttatagaagaatgtgtatcttgagatgaagaatcgtaattgtcagataaaaagtggtttgattcaggaatcagtctagaaatatgatattttacaatttcatggatgagaataacatgagacctcttcgaaacctcacccataacttaaaaatgtactatgatttattatatacacccctacactggaatcagttaatgtttaatgcaagaacaggagtcatcggataatcaaaatttactgatttctgatgaaaagcaattttctttagaatatataccgtttaaaaaaaggaaattatttgtacataaacatacattgagagaaaatgaagcttcaaacacaaatggtaaaaattggactaaaaacctggatttcacaccaatatcggaaagcaaagaaactgaaaaatactctggtgaagaatctgaagaagaaaagggatcaaaaagaggaggaacagagggaggaggaagaggaagaggaggagcacgtgactacacatattctataaatgttttgagtttagtaaatgatcaagcaaaacatgaaaatatgcaaattaaagaaaataatcttattggttccgtatgttaaattactatatttttcattccacattttaggtcacaggttctattaattcagccctttcccctgtaaaggactctcctaaggctatagtttacaaatctccaattgattcaatttacaaaatcccatctaaatacctaactattgatcctaatgttgttgattcagtccgaaacgcactagtaatcgatgtttcaggggaccaggttccgcctccaattctgacctttgaggacatgaagcttccaaggcctatattaaaggctttaaggcataaaaaaatatttgaacccactaaaatccagatgcaagcgatgcctgcagtcttactaggaagagacgttataggcatatccccaacaggtactttaactaagtttaatctctttttagggactggaaagactcttgtttttgttattccaatgataatgcagtcatgggaaattgagctcagacttccaattgagcctagagaagggccttttggacttgtaatttgcccttctagagaactggcttcgcaaatttatgacataaccaagtactttgctgaatatatttctaagtatgatcggcctaagctttattgtgcatgtgttattggaggaacaggcattaaagatcaggaacattccattaaatcgggagttcacatggtcattgccactccaggcagacttaattacttcctaaattccagaattatcaatttaacacagtgcagatacctctgttttgatgaagccgataggtacacactactctcatacatattctaacccatttaattaattaataatatttttaattaataaaactatagaaaatctgatattttaatatatttaattaaaactgtcaaaaatttgtaggataatagatttggggtttgatagtgaaataaagagtatatttagccacgttaataaccagcatcagacattgcttttttcagccacaatcccaagtaaaatccaagaatttgctaaattgacactgacgaacccaattgtggtcaacgttggagtctcaggatcagccaacaagaatgtaaagcaggtcgtagttgcagttccaaaggagtcaaagcttccaatgttgcttcagtgccttaagaaaacaccgccgccagtgctgattttctgtgaaaataaggcggacgtcgagattattaacgagtacctcattcttaaaggagttgaagcatcggctatccatggaggccttagtcaagaggagagaatagaatccatttcagactttaagaaccataaaaaggatgtgttaataggcaccgatatagcctccaagggactagacttcccctcaatacaacacgtaatcaactttgacctgcccagagatatggaaaactatgtgcatagaataggtagaactggaagaagaggagaaaaaggtattgaatcataaataattatatctaataataaattagggcttgcaacaacactgttggatgggtcagaggacgctagctcccttataaacttgaagtgcatactaattgagtctgaggaggaaatgccagaatgtttgaaaaatatacatgtgagtgaagacgcactcaatataaattgttaaaatgaataacaaaacagggaatctgtggttttaaagcctgttgatattgcaaaacgccgggtcacagaatctcacaatccccaaagttcgaaactgaattagataaataatcattgaaacaaaggtttgttacaaaaatagtggaattttatatataaatttgtagatggtggatttgagtgatatggttttaaagaaatcttgtaaaataaatttattttcataaatggtgtaatatagtgattaacttttaagtttataattttttatctttacacattccatgtcaattttgctttatcgggtgattcctctcatggggagtcaatttcatagatttgtaaattaaagatatttctctttaatatctatatatttctttttattattagtttaaaaaatatttttaattttatcgtaacggattccgtaaaataatttattcatttttccaaatttgtcaacttttctttaaaacccagccgttaattatttttattgtgaaaatgacaactagatttaaaaaatgccgcagactcaggggccacgtctcagcaggacatggaagagttggaaaacacagaaaacaccccggaggtcgtggtaaggccggtggtgacagtcatcacagaatcttattcgataagttccatccaggttactttggaaaggtaaaaaaattaatttcacatttttacttaggtcggaatgaggcatttccacaaggtcagaaaccagtctttcatgagaacggtcaatgtaaatcagctttgggatttagttcccgaggaaacacgtaaggaatatgcagataagcctgatatggctccggttttggatgttatgcaaagtggatactttaaagtgcttggaactggcaatatgcctcagcgtcccctcgttgtaaaggcgcgcctcttcagcaagactgcagaaagaaagattaaagaggctggaggagcctgtgtacttgttgcctaatttactttccactctaatacttgatatatataccttttactatttataatatgccatactcatcctatattacttatacaatttagttaataaagagattatactaagtaaaatatacaccgtaataatgtatatattagctaatgtaaaaaattagtatagagtataaaaaacgtgagtatattaattttaaaattatgtgcgatgtgttatgtcctattaaacgttcctaggcctgtgtttgtatttggattataaatagccaaggctgtgcctggtgatttttgctggttactggcaaacaaacttgatccaccagtaccgaatcctgtaccagtgtttgtaccaaacccggaagatgtagtggtagacccgaataaacctgaagtagtgccggaaccaaatccagtccccgtattactggaaccaaatgttgttccagttgtagtgttgccaaatgatgtgccagtagtggtggtggacccgaataggccagtgccagttgtggaagtcgtaccaaatgcggaaccagtgtttgtattgccaaataatccagttccagtagttgttccagaagtagtaccaagaccagtggtactaccgaataagcctgatgaagtggtgccagtggtagatccaaataacccacctggctgtgtggttacactttgtgtggttgaaaataaacctccaggctgactagttccagtagcgggagtagttgacccaaataacccagtgccagttgtaactgtattgcctaatcctgtggtagtcgttgtactaccgaataaaccagaccctgcagtaccactagtaccagtggtggttccaagtccagtagtactgccgaacaggcctgtacccgtcgttgttccagtgtttgaaccaaataatcctccaggttgtgtagttccaggctgagttgtggtgctaccgaatagccctgaacctgcagtacctggggttgagcctagaccagtagtactgccaaataagccagtgccagccgtaccagttgttgatcctaatccagtagtagtaccaaataaacctgagccagtagtaccagtttgagtactaccaaagagcccacctggttgactagttaaattttgactagtgccaaataaccctccaggttgtgtagccccagaggtggctccaaagggtgcagtcaaatttgaggttccaaattgagaaccgccaaataaagcaccagtattagtagcgcccatattaacgccttgaagtgaaacgctttgattagggacaaagtttgtgagtaaatctttgatattatatccgtaatcctttaggtaagggaagttcgggtcattgtatgaagagttaaagttcctcaggtaacggatctgtttcttaacttcagagtgctgagaagagtcagattcaggtggttttggcttatcaagtcctatggcgtttaaaaaatctgatctcaaaacactaatgtcagctgcaattccagaccaaaggtgtgattttaagtccatattaagtgatttttcagcttttttcaaaaggtttgatatcatgtctcccagtgttttgattctaacattatgactgtttagaacagattctataaagtttggtgcttggaacacatcgatttccttcaaaagttggacctcattctggatatactccacttcacttcggaactgtctcactctttcatacaattccctagataactggacgttaatatggttcggtatccggaaaacagacgacatatcgtttgttcctcgagtgctaatcacgttctcacacaatctcctggactttatggtcacaagattctgaaggtcctgacacctgagcctttcgtttaagtcctcgttcagtttatcttgttgcaggtttatgtcgttaagtgatgtttttgcatagtcaaatgctgattgaaatttggagtaaaggtcatacaactgtgataacataaggctaacattgtttaaatgctgttcctgagaagtcattagcacatccgcgaggtcaaaatgacccttccattctggaatcaaagtagtcagttgtcgcactgaggacctagaatcaagtacttgttgctgtggaaagctccctaaacctacattttggtagccgagaggattatttagtccagatcctggattatttaaaaaattagatgtattgcctaaaaatccaccagtggtgttggcttggggaaactggttctggttaaatagtgaagacataatggtttattgttttaaaaatcaatcatcgtattatttgaatatgtttgaaaaataaataagggagtggtttaaggtgctgttgaaacccaattgggttaaaaacaattaaaataaattattaaaatcaatttgaatttatatatgtataatatgatacaaaatatgttaacataattattatattaactaaggtatcgggtgtgggaatcaaagccttaaaaaatgaaaaaatgaacattatttagaaaataaatcaactgaaaattatattatacagaattatttttgcgaattataagttaaaagtgtaggaaagataagcatttgtttgtaggctcaattacttttttcgtaattgaatagattttttcatgaatttgctaaagaattcattaaaaatattaattttcaaacgtctcggtcatgattcgccttgatattattccaatatgaaaggtttccgaatcttttgaaaacctcatacacattttccatgttttcaagattctcatagatttctgaccctaaaataatattttcacgatcatttaaatttaccgaaattcccccttgcggaagaacattcaggggccaaatccatgtaaaaaacgatatcaggctctacgattccagtatcaggtatcaaacaccaattgaaatcaagtccctaagaaaatgtttgttaaaataataaacaaacctctgcgccaaccgagtatgcgattcctgagaaggcatacctgtcagttattacatgtgtgcctgactttaacaatttgatgattctattcctaaacatggttgaaaataattaataatttaaaaaatacattacttcccatctgtttgctgaaaacaggagatggagtgcctgttttggtattgactcgtctctatttccgaggtacgatctcaacagttttccagtaggcgttgttttatctaaatattttacacacaatttgaaaataatatcaactcttacatgggaaggttaatacttcgtttttaatattttcctctgacaatttttgcgatagtaatctaatctgcgttgattttccagatctaaacatgagtattaaaaacattattaaactaacctatcgatcccctcaaagacaattaatttgcctcttaaagcggtttccgactccattaattaatatattctctgatattaatttgttttcttaccatgggggagtgttgatacaattataattaatttataattaatttgtgtacatttaatttattttagttttctgattaataaaaaatgattttaagtgttttagacccatttcgtctcccattactcactttttattgtaatgtgtaactcttaacttttccgtattattcactggtattatctgaaattatttatactttacccagaatctaaaaatagatttaattttcatttggattctggtgttaaaatgagtaaaatttcaatgaacacctcactttcaactagttcagcattaccctatgattttgataatcaaccgccaaagaaaaattcatttagcacagttctcgatacagatgatcatatttttgaagaggaactagataattacctgggtaaatatgataattcctcgagttatatcgactcctatgaccccaattggttccggattgagagtaatttaaaggctgctaacatagcagacttgctaacgttttccaagaagatcggaaagggtgtttacggtgatgtttttctgtgttacctcagaaatgagccatcaaaaaggtttgcagttaaaagagtaaaacaggctacattcccagtaattaacatatttggtcttgaacagaatactataaaggagcttcacgctttaaggtcacttaaaagacctcatacaaacatcgtaagactgtatgactactgctctgcaattgaaaattcacctgtcgttaaccctcaaccgggccaatcagggtcagaaacttcacttgttttttacttaatttttgaactgtgtgatatggacttgagtaatttcattaaggaaaataatgataggtataaagatcaccagattgacctaataacatgtgtggttaaccagtctaagactaacgactttagagttcaggacattatcaactactctcaaaatgtatatttgaacgagaaaatgaagaacaacactcagaaaaaggggaaaataccattgccaggccttgaggaagatatcgctaaggtcataatgtaccaaattttacagggtctggcttatttacactcgaatcgtataattcacagggatattaagcctcaaaatatccttcttaaaaagtcaattgatgactttgactctttcacaactaataaatctccgcaaaaatggttagtttcacaccattaacatattataggcaagttaaaatcgcagacctcggactctcaactattgttcccgctagatacttatcctcaatgactgaagaggtcattactcttctttacagaccacctgaacttcttcttggagattgtaaatacactacttctgttgatatctggtcagctgctgttaccgtaggtttgtccacacataccaatatgatattattctagactagtatagttataatattaatataataatatactattaatataatatactaagtaattttagttaattttgagtaataaatgtgtaggagaatgtttactgggtaaaccgatgtttaggggaagaacggagtttagtgttttaatgaggattataagcactgtaggatgttctccgatatcagaggtggagaatttatcaaaacagtttaagtacttaacggtaagcgtttgggttagtaaaaggtgtttaggagagtattccacatattgaacgggatccttacgatagtttgaggaagatattcacagaccactttggaaggcaacttataagcgagactgggcttgatctgtttgtcaaaatgctcaagtttctaccaagtgataggattacagccaaggaagccttgaaacacccttggttctcagacgtcagaaggcttctaaaaccttcagttgtcaagaaatatcaaagcactgagaatatctttcctcgaggctacaatgatatgatgcctttgactttcatgggaaatgtcgaagagtttaagaagaagattaagaaaaaacagctattagatactgtttctgttgacagttatatcactcaattcaccttcccttaatttatttcaacaaattatttcaacaatttagtttttagcaaattatttttataaaccgttttatcaaattattataaaattctactattttaaaagttgacaaattaagaattgatatttaaaaatcgatgtgttgaagtttttatgtgttggtaaaataaatgttggtaattggtatatgcactccatgctcttaacactagaacatagatttactacaaaagcaaatatattaaattacaactagtactgattttgatttatttttaatgcctgcgcttaacacatctggcgatataatggaatccagttcaccaaagatgtcgagaatcagccagactaaaaactcaccaaatcggcgtagttcgccccaacctctaaaatttagatcctttgacgccttttaccaagattacagcaaaaaaaatacgtatgaagtttcccagcacaggacacctctaacacaaaacgcgagttccaataataaatcctcacattacaacattataacaacagattcctccaagaaacttgacagcaaatgtgtaagtttactcttattcattgttttatgatcttatttagggtgtttcctccgaagcttcaaagccgaaggttacctacacaattgaagactataacattaaaggcagggtaaagaggctttgtgaaatattccaaaaggcacgaaatgataatcattaccgttcccaacttgaaaaggtcatatcaaacaataagctcaattctaagaagcctgttccgagcactagtaaacatgtgtcagatccacaaaatgaccctcaaaattaccagtatcaacagcaaatgtgtataaagagggatcagaacactatgactgaaactgattcactgcaacttaagtttgctcagggctctgatttaccaaatctagaccatgaggaggttattttcaacactcctttgaggtttcaaagtccttcaaggggacctgttgatgactatgattacaggcctgggtatccatcaccaaagattgattctcctctgatgtcttctcagtttgttgatgagaaacgtgctccaacaattgaagaaatatcttcaatgctttctgctcagaaacttactccaacatattcccaaaatgaggtttcagtctccaatactcttgataaaaacgcccttattgatgacattctaaacaactttatgaacgatcctgagttttgtgatacgttcttctcaaaactcgagactcttaacctttacaataatcctaacactgcggagttttctaaactcattgatgaactccagttcctagtcgaaaatgacagtaacattgataatctcaccaagctcgactctgtcgaccacaagaaggactttgaatggttctttaatcagcctaaggtctttgactttagtgttcaagatcagaacaatgcagttgatcacaagcctcatctctttgagaatgactctaatatcacttcttctacctccactgagtataatcttctccttgagcagtcttcttctgattccctagaatctcttttggaatcttctcaacttcataccactgaagatgccaagactgaagtctccaatactgtcgacgctaatgctatagaggagtcaaatgttgaagatactcaattagttgaagattccaaaaccgaagaggattctaaggttgaagacccccaaactgaagaggattctaaggttgaagacccccaaactgaagaggattctaaggttgaagagattaatactgaactccttaatgtagttgaggatcataacattgaagaccttaataatgaggatcacaatactgatgatactaatacccttgaagactctaatgcagttgaggatcctaatactgatgaccttagtgaggatccaaataccgaagaatctaatgtagttgaggatctcaatactgaacactccaatgtagttgaaactctgaagacagaaaagtctgaaccggtgccagtggttgaaattgacttaatggaggaaaatcagccagacttttccgactttgagaagttcaaccttgaatccggcttcaactctcatctcagcaaacactttgactggatcaatactaacaattagccttgttaatattctaattccactcatacactaatatttataatcatttcgcaccactaatatagtaataatactagtaatagcatattttagtagtatagtagtaagattatgagattagttggattttaattttttgaagtacacaatagtggaacataatgacatgggaaagggcaataatttgtacaaaatctggagattaaaggtaaaattgtaccgattaggcataggggaggggaaggttttgaacttgtcacagtgtttaaggaacttgaaggaggaattgagtaatataacttcagaaaaggattgaagaggatagagaaacatgaacactaaggaaaaataaaaaataaaaacgtacgtttgtagtaaaaccattcgataaattcatttttgttgtctgtgaaggaattgtatctgttaagagtgtccattaaattcaaaagtgtccaaattgacatgtttacagttgaccagcgatagtgattatgaccctttaacaactcgaatgtgacataatacataacaaaaccctttaagtgatgaaacaactcagataaaaacaaactcttggaggatttggagtctgaaaaataataatgtgtgaggatttacctaaaaagaaaagaagattaaatgaatttaacactattgccgctttgactgaggagtttacgtaactccacatgtcaactttatgtaatagtccgaaatcaagtttaaatccttttcttgtttgactgtacaaatgataggccatcagggcttcgacgtacaaccatgctactaacaccaaagtgttataaaaaagtaaaaacttttttaaacagcaatcgtacgtttttttagcattcgtcatttcaaatatatactaaaaatctaatgtgttactctaaccacacaagtaaaacatcacatattccaaaccaacacattaataaaaatactatacggtataactaaagtatttaatttaagattttggtgacccttttttagccttcctggcttcaattgcttccaatctcttctttttctccaactccttgtgtagctgggattccttattactagcaaaggaatccaccagcgttattgttaagttaaaaacatgttcagtatccgtactgtctggatccttggtaaaatatcccgtcctctcaaactgaattggttctccaaccttcagtagcgttgcagtcttctcagccattcccttatataccttaagtgactccttattaacattttccaaccagccaaattcaccttcggttccttccttcgggtcaggctttgtgaataaccttgaataccatctaaaagttgcaggaaaccagtcatttgatcccaaccagtgtattgtcgcctttaccttcctacttttatcttccaatttcccacccttcgttttcgggtcatattcacacactaacttctccaccacatctccattcttcactacctacaccattattcatattatactactatgtttaatttttaatatttgtatcatttgacacttataatactatagtaatactattacacttgagtatgtaaactaaatatgaggaaccttggtgcatttgatccaataggtgtagaaaagtctgacttcatttccttgatatagtctataaaaatcacttgaaggtgactctgaaaagtctttacgatcaacataaatccgctttgaaaacgttaactacaattaatttatcatagtaataaacgtacagttcgtgtatagtttggattattgcagggaacttcaactttttcagtaaatgtatcgtcgagattttcaatttcaactaaaaggggatctaggactgcgaaaaatcttgttgaaaccttgtttaaatcctctctaaaccaatgtaaagtgagttatcaaacctgatgcagttttccaggagttcaatttggatcatattctctcttttggctactccaattttgttacaaaagttcctaattgactctggtgtacatcctcttcttctgagacctgagattgttggcatcctagggtcatcccacccagaaacaatcttagtgtttaccaaatgtaatagtaacctaaagcaaatatcaactcagtgaaaaaaccttttactcatgacgcaatatgaaagattgagtcttgcaaattcaatctgtcttgttcttaggattcctagtttttcctgaaaccagtcatacagaggtctgtgtaactcaaactcggtggtacaaatcgagtgagttatacactctagactatcagattgtccatgaacatagtcatacattggatatataatccatttatcgcctgtattaggatgaggcgctcttattatacggtacataattgggtctctcatgttcatattacttgatttcatgtcaatttttgctcttaaaacacactttccatcgggaaattcaccatctttcatcatttcaaacagttttaaattctcctccactgttctatttctatacggagaatcctttcctggcactgttagtgagcctctggactcccttatttcctctactgactggtcatcaacatatgcaagacctttccttattaattctaaagcccactcatagagtttatcaaagtaatttgaggcatagtataaatgttctccccagtcataacctagccatttaacgtcgttttttatcgactcaatgtacatcacctcctcactcattgggtttgtatcatcaaatcgtaagtgagttcttccaccaaacttttttggtagttcaaagtttagacaaatagactttgcatggccaatgtgcagaaacccgttaggttctgggggaaaacgtgttattacctctctatgttttcctgatttaatatcatcttccactatttgaagtatgaagttggtctgatccctggaactggccatgtttaatttttccattttactggaaacagcttcagtgttatttaaattactagacattctgatattactaaattttaacctgttaagaatagcagaagttatttttataggcataaagatcaaggtttaggactgaccacatgaataatcacagaaataagaaaaattcaattaaatttaagtaaattaacacaaaacattagagaaaatgtgaaaataaaaggatattagttttattactgtaatcaaataattgtaaaaaaagattatttacacgatgattaatataagtttactgaagaaaatagggataaaataatattatactgaagataaaaatattatattttaaaatataattataatatgtaggtttgattttatgtggaaatctaaatgtgtaaaatacaagtttaaattttaatcaggtatttcgttcatactttatggtataaatattaattctactattaatttggtattgatttatttaaccttcttgaaattagaattttttcagactataattttatactcgtatttatccccccagattccattacttgctaaaatataatattattatatttaatttatttatcataccaccatttatatttttatttaattaatcttttagtataaattattgatttatcaaagctacaatgaagagaggtactattcatatatataacatagatactactgatataactggttatataatatttaggtcgtggtggttctggtggaaataaacttagagttactttgggtttgcctgttggagccttaattaactgttgtgataacagtggaggtaaaaatttatatcttatcgctgttaaggtagggagtatagtagttatttttctttaggggactggagcctgtctcaacagacttccatccgcttcagttggtgatatggtactagcaactgtaaagaagggtaggcctgaccttagaaagaaggttttgccggcagttattgtccgtcagagaaaggcttggagacgtagggaaggttacttcatttactttgaggataatgctggtgtcattgtcaaccctaagggtgagatgaaaggctctgctattaacggccccgtagctaaagaatgcgctgaactctggcctaaaatctcagctgccgcaccttcaatcgtttaatattattctcaaaaatatttattatacatacaattttaatacatgtaaacttctaagtttaacctgttatctaaccacaatttatgtactaatgtatagtttatggtacagattaaaaattacatgacaaacatgatgtagaggcaagttaaaaccgtaacgagaattaaaatctaaagaaaatttaataggaaagatttaacctttataatgagtccgcggttagatgaaatcctccgataatactttaaaagttcatttttagctatgcaaaattataaactgttagaaggtacctgatcttacattacttagtgacacttcagtgtcaaaatctatccgattaatcatttcatcctgttgagttacatatgctgtaaccttttgaaatatctgagacaggtctccaatcgctctctgtacatttgctatcgcctcctctctagcattagatatcaccgacgttgaaggtgccgccgttatcccactaaataaaataatatggcatatatatatatatacgaatgctaaagtgtataattaatggaatggtgtatagataattgaatagtgtgtttggaacctttcgagatcgagttgttgttcagcttctaaatcttgttgaagcatgaatcgttttctaccaattcctgaagtttgagcatccatgtcattaatggcgtatagtttacgcctattttcctgctcttgcataatttgcgctctctgatgcagagtctccttgaaagtattggtgacgttaaagatgtcatttcgaagctggaaaataatactggtgtagtgttttttggaagcttcattccgaaacttgaaggagttgatcctgttttcaaacaaatctatagagcttgtggtatatgttaaaattgacttaatttcagaagttagcctctcaatggaggaagtgttatcaagataaagactacgtttctttgctaattgcgatagttcattgagcttagctcgggccttctcaatttccttataaatggaatctgcatcagtgttgaattctaaattttcaaatgtttttggggcttgagtattgttaaggttagaattctggttaacctgggtcataaaaaattttgtcctatccacagagttaaccataattaggacaatcttaaaataaaaattatttaataaattcgtgcatttgtattatctggaagaggagaaaaaaccgcacatatgaacgaagaaaaataattccatatcaattactttatataatgtaatgttacctaaaaagattacagattatgacgttttaaaaaaacattatacatttttaaatgatgaggtaaactcattgtttataattaataaattatttacagaatgataaatcgtgggaatccaacctagtttcgaattatcatgaaacgttattcaaagaatttgcagtttgtgatctttccaaatataaatccggcgatgtaactgggttatatatcttaattcttaatgtttagatagctttaaggtggagatcagcgaatgaagtagttgaaggcaaatgtgagagtatatgtgcaaatgtatcatgtactgaaaccttaaatctatccagttacgaagtactatttaactatattgaacataaagttaagaagcaggttagaatctcccgattctatttgtataggctttagttaaagttcgagtatgcccggaatgttcttataaacttaattacaagttaaagttcaaaaaaacagaacctaccaagggtaattttttacttaaatctattgtatattagaggaatcggactgaaccagtgtgattgtacggtaaaatgacgacattatctaacaattttgaagatccaattctaaatatattcaaaagggtatgataatttatgattacaaattattagtttgaaagttttgagcaagatttgttactggttgagcaaaaggtgaagaatgaactcagatgtgtttatgacgttgacgtttttgatatcgcagaatctattgataatactaaaagtaaaatacgtaaactctttgactcgttaaatgtaatttttatattaataatttgagtattaggaactttacacatataaaagtcaattgttatcactggttaaatcgcaagtttcagttttcgaatcgttagaacaagttgaggtaaaattttaaatttcttaacactgttcagagtgtagataaagtaaataataaggaacaacttgtcgaattagcaaacaacattttaaaaatatcgaaagaatactttgatataccagataatcaaagtgtgccaatagaattcaagaggtaaatactattaaagattataaattttagaaaacaaaccaagaatgaagaacctgtgaaggaaacaattgaatttacaccggtaaaattaattgaaaatatgaaaaatttagattaccgaagtagaattcgatagcgtaccagtattagttaaaagaagagcaaagttggaacaagtgaatgagctttataagtatttgcatgaacacgctgtaaagagaaataagttagtacttctgaaattataattgttagatgtgttccggtgaagattaacgatattgaaaacgaaggaataaaagtacatggccaaacaggtgagagaaataagaataaatttgtgaaggaagttcaaaaatcgcaatattacgtcatttaaagaagatacaagtgattaacaggtattagaatacgttccacacgtgaaatcagggataacactattttactcttagattctaggtttaaaaataaaaaatcgccaaaacagaattaatttgtttcattactctttgttttactttttgtttaagttacacatttataaccacacatccgagatgtcgtttttttactttaacattaaaaaccatgtaatttagtttaaatgggattgtattatattaagataattttaattttaatatttgttaaaaaaatcaggtgcagaaatgcaaatgaattttacacattcaaggactctaaagccacgtcagtttttatcgcaccaaacaatgattttgaaaaacacgggccgaatagagcctttcaaataggctcttcatattggtcaagtcaaggtcatcatagtgacactgattttggtactttcttattttttaatgtgtgtttagtgtcatggacgggagagttatatgagaaggctacaatatcgcaagttaatgtatactgggaatacgccccaaaggtaaattattgagataaaacgtgttttaggaggttgaaatttcattttcactaactggagatgatttcaatgtcgtcatgccattcagaccaacttttgaaaataaacgtaatcttaacacataatatcattgtgtaaatggatatgtatataatttttaggctcttataaggagaattttaagttggaaatgccatatgagactaaatttgttcgtctaacattgagaggagcaattaatacatacttcggaataaggcatatacacttggtaggatatggaacaccgttgtttatgataaagtctgggatctcctctaaggaaggtgaaatgtgtcttcaagttgaagaaggaagtgaagaaaatcaaccgagagtcgttttagatctctgcgttaacgcaatcgcagcttcagacggaagagtatggaattattatgtttgtaatgatttgtttaggaattgtggagacagaattcaagaatgcaaattgtgagtgcagtttcatacccaaaaatgtgcttaactactgttgaatccactaaaggtattccaatccactatacaaagtttatatttaccagttaatttggtacataattatacccatagttaacataatattctttagttggtcctgtgataattgataattgtaatgatgactcgtgtacttgggagtttatgggaaactcacagttatcagttaagaatgggaatgagttatgtttgacacagaaggatgaaaatggtactgtggcagggatgggaaacctggtagagaaatataaatcagagttaaaagtgacatctactggaagtagtgaaaaccatgaagaaaagtacgcagtagaccttgataagaagacgtactgggcatctttaatattcccggatgatggatatcacgttacaagtttaacacttgactttggtattgaattttctcctaaatattattttagataagatggtacatgcctcaagagtattaatagactgggaataccagcctctaagttacacaatagaggcgagttcggacaaaataacatttaaagagatttcaaggaatctgtcaaacccatttcacactactacagactcgtttcccggtacagatttcaagcagttgaggatcataatgatgaagcctcattacttgtacggtaaggtttctggtggatatgtttacgggataagagatttgtcagttttgactaataatttagtaacggttgttggtgattgcagagcggctgcaaacagcgcagacgccagggataagtattttgtatcctacgtcagcacatttgagccattactttctaagaagatcagaggtatggaatctgatctaaacagcgtaatttctgaagtatcaaatgaactaagtcatttgaaagagtcattagaagagtcgtcaaattgtatggatgagaagaaggattatgataatcagctaaattcatactctaaaaagagtcaagatttatggaaactgtttaattcgtcaacaatcacaaagtgtgacccttacacacttgaattatccgtgattggagaaaataaaaataaccctgcggaagactgttttaatatatataatttgaacccaaatgtaaaatcaggtttttactggatccaaccaccatgttccaaagctccgttaagagtttactgtgacatggattctcacacttcaatgtacatttggaatggaaaagataattcaatatcagttcagcctttgaataatataagaacaccaacttcactcaggtttcaatgtgcttcttatggccttgaaccgcttgtaattaagtcgaggcgtcaaattgatcacctgaaaaacgctatgaaactcatcccactcactaataaactcgattcataccttccattggcatataaatttggctcagaatcgaaatttaaggattttatgaatatattttcattcatctctttctcacatgataaatctgatgtgacaagttccaatcccgctggtgaaaattccaattctgatggatttagtgagtccacagagttgaatgacttacatgtgaatgcagttggaatatcaatgtcaacagaggagcttgaaaggtttgacctggagacttctgaaatttcaggaattgtttgttcaactaatgttacagatgagattacagcgcctttagagttggactgttcagactcgttggggaggtctaaaaaaatattcgggtctctgaacacaagtgtgattgtccgttgtgacgaagactgttctcagaaggataatttatttatttatggtacaaatggactgtacagcgatcatagttcaatttgtcttgccgcaatacatgctggaatcattagttcccatggcagttttgtagtttccattgaaaacggtagaaaatactatgatggagataaacagaatgggatccagagttacttttataataaaacgtggcatgggcttaaggatataattcatgaaaatgaaccaaatggtgatagtaaagataattttgaacataacggtcctgataggaagtatagtatcaggatcttaccacgtgaaaaacgatgcccaatcattgaaaccaaaggctcattcctacaactcaccaatgaaaatactagtaactctgttgataaggttaatacagataatactaatactagtaataatattaacactggtaacaatactaataataatactgttgataatactaatactagtaacactggtgatagtacaaatgaggtgggtgagatgagtggtgataaagtttatgatcctaatacggtaaaatatgcgaataaagtaattgagataatggactcgttatacggagttgataataaaactgtgacaaacgtagttgaacagatttctttagttgtttcacaagcaaagaaacatctcagagcactcgaaccaatacacaataaacaaaatgataccattacatcattgtagctctcctatttactctttattagtgttaattaagtattaatttcagttatataactaataatttgtataatttatggtttagatttgataatggaggatcactgacatctagagtgaattcatattatgatacactggactcaagtaggatgttgtattcaaatctattgactgatgagaagaataagacagtagatgtttcatcagactttgagttggattatcataaaatgccgttttctaagacatttacagtccatgacagttcaatggcaagtggtaagagtaattggggttattcaaactcaccagttgaaggtcatgagtcatatgttgctcagtctggtgatttagattctgagttaatttctgaaggttcatttgcatttctgaatcattttaagtattttgattttgaaatttcacttgacgttttggctacaaatgaaggatcaatagggttagcctttagagttcatgaccagtttaacttttacctctttgtcatgagttattttaattcaaacaaacaactcattaaggttgaagatggagttccacacgtactagcaacaaatcctgatgaaggatataataaaatgcaatggtacaatgtgaaaattaagtgcactcattattacactgaagttcattgtgataatcgactcatattcaggtaatctacacacattagttaataatgttcagggtgattgatactagtttcttgtatggttcttttgggctttattcttcaggtgcaaatagttcattttactttgataagttgtcaattaaggctaagaatgtacaaattttagagtcaccacttaggcttgaaagactaaaacatattaaatgttgtaacttctcagaaacttactcgggcacttttcaagaaaattataacattattaatcccaaatattcaactaataccgattggtcattcgaggtaatttttacactatcaactatctacagtattcacattttattacactgattgtatgattacagcatgaattattctttatactaataatttatgattagaaactgtttaatggtgagcataaagtgatacatcaactgaagtcttgttatgatccacatgatattggttctttagcaatattgaaaaatgatcgctactgtaagtgtaaaattagttaatgttgagtaggcactggtgggtatttcaggtttagggtgctaccacaatgtgaatctggtactgtgggtgcagttgttcattatctggatgaaaagaacatgtgtctggttgagcttaactctaaggagtttagaataaggcaattttcatccggggtagcgaaggtacttgctactgaagaggcgtcaatttccatttctaagtggaatgtaattgaaattgaactcacagacacagaaatcaaggctagagcaaagactaatgtggcccataattttattttaaagtcacttttgccatcgtatgactttaaagtttcagccactattgagcccaataaaggtcattctctgggccttaaatcctcagcttgtggttcttgttactttgatagtgttcaaatatcacattcagagcctaaggagttgaatacaagttttatggaaagttcagtctccagctcctgggtaccttgtctggcctctaatcttcttgaacgtagaagattgtgtagtttaatgaccagaaataatcctaacgagtgcatgaacgacttttgtaatcagtgttgtagtcatcacacaagacttttaggtgatcatgtaactctaaagtgtaccaagaagtgtgacaagaacaatttactattcaagttaaactctgacaaattcgccacttacttaagtgcatgcacttcatttcaaggcccagcattcaatcattgcaatttggtaccctataaatattatttattatggtttaggacgcgaattgtctatttcactcttgtaagctttgctgtaactctggttactataatcaatttgatgataaacgtaaactcatagaatcaacgtactgtgaaaacaagtgtaaaatacccctactctatcgctaatgtaaatacacctacgcacataatattatgaatatagtattttgtatatgtactctggtgtatatgtgttggagtatgactgtcgcatgtatataaatatgtataaccatagtagtgtagtatatgtatattagtatgagtgtactttatatagcgtatattatatagtttaggactaaattatgtgctttacacagtattaaacaaaagtcctgattgtttaatacctaacgattaaactaaactttaaatcttagctcctaaacatgctttggtttaggcagctgcgtgcagtttgagtgcgtgcacgagatgatgagctgggagcccttcaacctcgtgaagacctggtactaactcgtggagggcggctacaaaagcagccataccaacaacctttcctgcacctggatttgctcctgcagcgaaggcaaggaacacgtggactgcacctcccaatctgtgtaggagctccaagtgtacaaacttcttgctattcttgctacctacaaagtgtaagtccaaaaggaattcatctgcggctccttcccagaccaaatggtctttagatacaactttagttaccttagcatgaactggtctgacccaagtgaagaaattgtctcccttcttgaatgttttgtgaaggaaaacggtatcaggaagctcgccgagtgggcatttaccacttgttactgtggtagcagcgccatcaccatgttttccgtataggacaaaccccaatttgctcaagtctagctccgcggctgatacatagatgccagaagtcagagcagctaccaaagccaatgtaacaaacttcatcattactaacagaagttaaatgtgttagatttagttgtattccaactgaggataattatccctatatctgatggggagaacaccacaattattcctccccatcgattcctacaaaattctggtcttatcctcatcaatctcattcttaacactattgttaatagtttattagtaagtgtagtataatatccatctaaatacgttagtgttggtggagggtgtgttcgtaaaatcattctatccggggataatcaagcaactaggcatggtagcaagtatatttatatagtaaagatatattataataaataaatagaattatagatatatagttaagagttttaaaactagttttggttaataaataaggaattttatgtttattttgtaaattttaacgaactttatagaattttgaaagttaaaaatctattttataaaattaattttggaacaattttaactaaatttaacagaatttatctatttttatgataatctcctctttcctacaaagatatcagtagttaacactggtatatcacagcagtctcttaaacactaaaaccgatttttaggtagttaaaatcaacttttagaagtaaatttaaatagtttgatgtattaaatgatgtgtttaatgatttagaactaattaattaaattttcacaatagtcgaaaaattttcatttttttcaaaacccaaatgccacttttaggtccggaccaaaatcgaaaaaattcaaaaattttaaaaattaaaaatttcaatccaaatcaacagatttaacattgttaagcatcagaaaattcataaataaaaaaaattagctatatatactgatttactggagcctaaaatatgtgattagtactgtacctatttggatgacttttaggaaaatcgactaccggggacttacctacaacaaaataattataatattattactaatacctatactaagctatatatactatgtgtatttgtgaaattatagattagaacttaagatctgagtcattaaaaaggatttgatgaggtagagataactcattgagagtattcgagaggttaggaatgacctgattgattaattgtaggttttcagggcctataaacttctcaacagtgtgtttataactatccctttgggtctttgagagtagtagctggatcttagaatacaaaggactcctaccagttggagtttgaaaatcgaaactcctcttccattcaaagttactaattactctttttaacctgtttagtgattttttatcccagttaccgccagtgtaatttgtaagtgagagttgatgatgagcaacatcaagtgagtttaaaagcctcggaaggccattaaaatttgacattaatttcccaaaagtctcattactaagtctagaaactgtaagtgccagctgtattacagttgataaaggatcaattagttcatttatgttagttgaaggtctttgtttaagaaggtcgcccttctttctcttcctcttaatgataggaagtgttgaaatatcaacatattccgccttaggatcttgagatgatagagactctgttgatggaaaagataataaagatgactcagatttaccgagattagttactggaatctcaaaagaacgtgaagaagtgctctgtaaaggaggtgttaaacctctttgtattggaggtttatgcctagatctagtgtttgaaaggacttttctattgagtaaattacaaattgtgttaactcttttaactaaaagtggtctcatcctactataaaactcgtcaagcttaactgcggcttcgtaaaacaccgtatccggagaattatacgttttacagttatcaattattaacctaacatcattatcaaagactctgatatcatctttataaatttggtcatcgtttttatttaacattgtttcaaaatccatcggatgtttaatataattataataatctgttacaatattagtatccaccgggaatctaaaaattctttgtttatcaaattttataagcttatttatcgcttctacatatgtgtatttaaattttctaagctgttctttgagctcatcttctggtataaaattccaatttgagttcaccgtagctggtgatactcccagatcaccagcttgatacttgagattattcatcatcaatatacactaatatacaataatatacatgggtattatgaaatttaaaaaattatttttttaaaatttgagagttttgtagtgttttaacttttctttatctttacaccttggatatataacttatctctgcctgtaattttctgaaaaataaaaattttataaagggaaaacactctcatttggtcatttgagaacacataattcgagatattcttgaaatggtaatccatgttctcatacacatcttgtggtaaatcaagtttcttactgtcaaataatgctttatacagctccagatactcttgaaatggatgtgattccaccagttttaacccgattttactacacaaattcacaaatttacgccatggaactacatactcactttcgtctatggattccattaaaaagaaatggtatttaagtccccaattactatttaacacctcgtttatctctgtataacttaagctttccgatgaattttttatctcctccactgatttctcgtccatagttatcttaaatatcggattcccaaactcccacacttctgacacattatcaactttatactattagctatactaactatatattgttatgtaaatgagttcgttaccggagctgtgtgaattgtttaagtttgatgctaattctttggagagttgatcacaacagatggttgagcctataaaaagtcctccttcatttagagaattgtgtattttctcaagtataaagttagttgaggtttcagtgtcgagcatgtaatgaattgccagttgtattgaaaccacatcaaaggtattatttttaatgaacattgagtagattttagggtcaagtaagttcccatgatgaaactctgcgttaaatgaaagtgttctcttcctctgaccgtatcttcttctagcttcattaatttccctcagcgatatgtcaattcccatgagttttctaattttcttagtgttatatttatccaaatcctgagcgtgaccacaggctagttctaacactgaggcgtttttcttaatattacataggattaaaactcttttcaccaagttattgtacttcctcaaagcttctattgctgattcctgttgtcttatgactttcctagtatcataatggatctgtgcaaactctgctgtatctccaaataaattcggataataatccaaggcatcatcctttctatctagagtgtcaagttgcgagtcaaccagtgtgccattgaataaatcaagtaacattcgagtattagattctagaagtgagactatgtaaccaaatctgttaggtttagattctattaaccttttatactgtctgtaaagctgtgagttatttggaatcttcgaggagtctgtagaaacttgtataatcttaacctttgactcttcagaattatcaacgtcaataaatgggttagagttggaactatttgtagcaataaacgtctcataaaacgaagtaattagttcctgaattccaagaccacaaagttcatcattaattggaatatcccactcgtcgacaacttcaaggttaaattttatgaactttacattctccaatttattcgtgttataagttctcaaatgacgaaataacatcttcaaaactgatcctctagtctctgtggcattgtggttaacagatattatacagttagtttgaaccttaaaatggtaatctgactgaggtctatatactataatactatccaaataattgtaagtatattgttttaaatcattaaagttcaatttttcattaaatataaacgggattctatatatgattgaatgacaaaacccttccttattattaactttagagtcagagttaccagttttagtattatacacaagttcaacttctagataatcattattttgtactaatttacagtagtcagatttacttacaaagaggttcaaatataaagaatccaagcactgttttgatatgtttggtacaaattttaccttgttaaaatcaaaatccaaaaccgcttcagtctcagttggtaaatatatgcttcttgatttgactacactcattaattttcctatttggaagaccacattacatgacagagggtctgaaatgctatctaaactttcctttatactatgacatatccgattatgtattgtattctcgttatactgtttatcaaataaattatagccctcaattagtaagggattatctgaagatgtcagttctttaaatccagaatctgtggaatcctccttagatactttacgtctactcttaggcctattaatcattataacagattatcacgtaaagatcattttgacacaaaatgtgtttagataaaatacttatattttatacattttacacattacaattataataaaaatttaacattaaatattttacatttaatctaatctacaatatacatataataaattttataaattttataattatatctctttttacaccacattgtcaagaattcaaatatattatttttgatttatcatattttaattcatttgtattaatttatattttaatatgtaataaatatttttcattaaatttcaaatcgatctatctaattaacattaaatttgttatataaagtataacaatgggtattccactttttaattttaattttatcgccttttccctttttcttatttttaaatgtattataaactctaattgctcgtatatagatgccacgacttaccttgaaccttatcaacaattctgtttatcagaggttgttggaaaggatatgtttgtacacttgacatttgggattctagaccttaaaccagggcaattttactctgcctatgtgatagaggaaggttctgataagtatatttaccgtgaatctactatcagaaacgacgtctcaatatcctttacctctatcgaaggtccttctattaccttatgtgttaacggacctcagtcaggtacaaattttaacttctccttaaagttcggtgctgacgctagggattattcaattatcgcaaagagttcacacttggatccagtggatgctagggttcaaaacgtcctagatgagctttcagcctttcacaaggctcagattattggtgcgtcatctattgatagaaccagtgaaaaggctattaagacttatcatttgttagccagatttgccatcgccaatagcattttcgttatcttctccacattgtgttatatcttttactttagaaatttctttaaatctaaaaaactaatataatataaacactacagtatatacattatactagtattagtatagtaagttagctataccatgtatattccaacttatatctgcgatgatggttgagaagtgttaatcctatgccattactatacacactatactatacatacataaccacattgtatatagcgtatagtatattatattagagaatatttaatatctggaagttctataatcttgtttgaaatattatcccttgcaataatgtgtaaaaataactgaccagagggatgatttagtaagtcttgaagtggtttgaaccggttcttttcatctacaatcaagtacccgttcttaaatgttagcccgtcaaccttcacgtcaaagataaattcaagcaaatcaaccaattcatacaagtaaatcatctcatttcgaaaaaatttaccactcaaatcaggaacactgggcttatttgagatattaagactatttgttatggtgtgtttgatattggttgaattgggagcactatactttctgtgatcccgtatggtgaagtgatcccagtatgaaagtgataatccatcgaggatagagtttttattatcaattgtaaagacttttggaggttcacatgtgtttgtaacatatttcattgttgcagtgttgaagaaaatatttttgaagaaaccacacagatgcttgagtttagaatagttgaaaggacaaagtgtaaaaacaactttattgccattacaaaagttaatctcattctgattcacaactacatttaattttactttatcatttatgactacttcatttacggagtttgtggaagtaattggtaaacttggtataccagttttaccaccctgtttaggacctaatctactatttttgataattggtagtttgtatagttccatgagtgaaagtgaagatgcgattgaaacgcatgtagacacagctggtacaatattctttgcttttcgaactaaattggtttttgaagcttctgggatattgaatttcctagccctcaagttacttacaagatatacaaactcagttgagtcattgcattcctcctcaatcacaagtggaaccaactcataatttgaattattccttgaattacaaacaaagatatcaaataatctcagaaaatcctcttttctaatgttagtacccgatacatcaaccccaaactctttaaatccatggtccaacatgaggttaaacttgtcaaaatccacattaacaggtttaattccaacgtttcttagtgatttgaacttcagattaactaatgttgagattagagaatctttatattcagattcatgaccaacgagtttgtcatatttcattttagcccattgcgttgctgaatactctttcttcttatcttcagcgtttattatctctaaattttcataaactatttgaatcaagttgtggaattgtgttttgccagacttaatagcttgttcaattgccttaactgggtccttaacaaagttattaaagatcatgtgctggatattgaagatccaggagaataactcaattgagtaaaataagcaatcttcaatgtttgatggtattccctttaccgaacaactgtatctatctgctgatacagcttcatctcccattgaacttgcaaatgactctgtaacatacggtaccacaaatgaggtactacctaatccacattaaacccttgatatatctaacaatataactaaatatatataactaaataatattatatacatgattaattggggatacatttcattccatgaattccggcttctatcattggtacgttgtgtaggaggcaaaagttatccagtgctactctaccttcaatgttatccacagctgaaattgctacataattattaccctttaaaatattcttatcaacaagctcaaaactctcttctgtgaataacttgttataatacttgtatccactagtgttatgaagtaaattcaggttcctaagggctacttgtgcttttggtttcccaacatcatttattgtaaacaaaacctgcctagtcaaatttgatacatcaactgtatcattgtcaaataccgtgacatctgatactcccatttcagccaaaagtttaagataatcacaccccaaagcgcctgctcccaccaccagaaatgacattttcgccacttgctccattgaattctttacgttctcagcatccacttggcctgactcgtcactgaaaatatcacttctatccactaatattaaatccgacggtttaaatgcgtgtgtaatcgacttaatacactcttgagctgccagagcacctaaatacaaattataaacacgtgtatttacctattagtgagttcattgctgggattttaaagttctttaaacagttatagttagaaacaaccttgtagtcagactcatcataaatttgtttagtaactgtgtaaaagttttccaaatctaaatgagactctggtggtagattatatgaatttgtcctactcaacgctatgaatgaggataacactgtcaataatttactgttcagactaatgttaatatccggaccaattaccaatttctctattgaatcactagtaagcatttttttaatgaactttactaatttatttccagtaagcagtgaattcactactgattcaaaggtgttaaacctgattagttctggtttatcaacttttctaattgatactactggacctattaatttattattcctggtatcaatccacagttttacagaaccttcactctgtttatctacatttaatatcttaaacttgttaatagtgttatcagtaacaggttccctgtacctaacttcaatgatgtcatttttactatatcgcgatctatttaatgattcattagataaatcagttgtctctatttcaaggcaggattgatcaccagtgtgtaaaatccttgctgattcttcaggataagtttcatctgatgttacggtaacttcatggtcaccgaaatcattaagaacaacaccataacaacctgaaactgaagcgtaaactatgtttaactttttgtggaataacttattaaacttgatggcagtaagaatcggttggtttgataatattacagctgaatattcacagcttgacaagtgtttaagaagatcagtgcgtaagattttaacattcgcatcagggtttaaaagtagaatttgctttaaaattgactttgttactgacttattttcgtcccaaactgttactgaagacactccagaccttattaaatgtgttatgattttagatgctaagtcattggcgccaatcaccaacacatttgagcaatttaaaagttttacacctgctgatccaagcaaaagttcaactctcgatattttactattgttaacattggaatcttttgatacattatttttataagtgttagatttattagggctagaattggaggattctaaggcttctatgttcttacagttacaaacatcatttaattgcgataaattgccttttttccctggattcctcttaaaatttaaaaatccttcggggaaataggatttattattattaaataagtttacacatgaagaattcagaacagtcgtgaacaagactaaattaaacacgttaaaataaaacatccaaacatatttaaattaatggaaaaaataaattattaatgattaaataacaaatgtgtacagttgaaaataaaattacaatgaatttattaacttaatagtacaagattctacactagaattggagtatgggtaatggcgaaatttcttccgtaggaaaaagtgttatcatttatattcacgttcttgtaagtataaatgagccttttgagtagccactgttaccttgttaagtaattttacagcctctttatcctttatttcatactttttaagcttaatgtcaactgaagtctcaacgttcttaaccttttcaacgtcaaactcatcgataaatgaaaatgcgataccttgtcttcctcctcttccagttcttccaactctgtgaatgtaatcaaaagctgtgcctggaaagtcaaggttaattacaaacgaaacttctgggacgtcaattcctcttgacactaagtctgtagcgactaataaattagaatacccagacctaaattttgacagtgagtctgtcctcttcgactgtttcattaacgaatgtatgcaagttactttaaactcaagttgatctaaagttaatgaaacgagttggcatcttttcttagtacatataaagattatccctttagccttttcatcctttaaaaatcgctccctcaatacatatactagatatgttatatggacatgttgaggtaggaatacgtattcgtgttcgattttcctgttaagttttagtatttttgatgactcttcagttgcgtcatagaactcgaaggttgagtttgaaatcttagatgctaaagttcttatggagtctgtaattgtggctgaaaacataaatgtaattctcccttctgaagatttgggaatacactttaaaatctccttcaaaggctcttgaaaacttatatcaagtaacctatcagactcatcaaaaactaaatactttacatttgcaaagatacttgataaattacgttcagggttagaaacttggtatgccagtcttcctggagtcgctataataacatgaggcctcttttccatttctatcgactggcttacaatatcaacacctccaacacatgataacacaacgatgttcatgttaacaccaaatattctaaactggtctgagatttgaaatgccagctccctcgtaggggttaacactaaactataaactccatatggattctttgctaaagatgtaagtataggccaacagaaacaaatcgtctttcctgttcctgtttcagaacacccaattaagtttttacccttgaaagctgatggtaaacatagcttttggatcttagtaggcttcttaatctgaagtgatttacatatttctattatccaattaggaaccccaagtgattcaaacgtttctaaattcttctttttattattttcgtgtatatcagatgtatggtttggtgtttccaaacctgatttacgaggttttaagttaattttagaatcagaaattaatttaaagtttttagatcctaaaccatctaaattccatttattaatattcagattatttacagaggaatgagattcttcaactaaatcatttgcgatagttgtagaacaagaagattcagataacattctttaaaattctaatatacaattaaatcattttaatataaaattttaaaatttgaatttataattaaaaaatggaaattatatattaatataaattgaacgtaacatgtcctgacaaaattggaaataataatattgttaatttatttaattatatttatttaattttactttttcctaaattgtattttactatttaaaatggctataagtaagtgaatttctgcacaattcttcttcaggagctcagtatgagaacagtaatgaagttggagtcttttccactctgactaattcgtatgcactggtttcgctgggatcttccactaatttttcaagtctttttgaggctgaattgactcctcacatcccagtagttcacacaaccatcggcggtacaagggttatcggaagagtttcagttggtagggaatttctaacatataattttatataataaattttaggaaataaaaaaggactcttggtctcaagcatttgtacagataaggaactgaggcacttgagaaactcactccctgattccgtagaaattcgcagaatcgatgaaagattatccgctttaggaaattgtatttcagcaaatgattatgttggactaattcatgttgatatggataaagaaactgaggagatagttgaggatgttttgggcattgaggttttccgagcctcaatagctggcgatgtattaattggcagttatactagatttcaaaataaaggaggacttgttcatgtaaaaactacgacgagtgaaatggaagaactttcacaacttttacaaattcctctaacttcaggaactattaacagaggctcagatgtcattggcgcaggtattaatcattttagtataattttattgtaggaattgtcgtcaatgactgggtcgcattttgtggaatgtcaaccactgccactgagattgccacagttgaaaggatttttaacttggcaagaccttccggcctcaattcttctatcatcgattcttatagtcttaaaagtgcattaatcgacacactaatttaatcttctcctctttttgccttttttaatttttttccttccatgcccgatgttgaatatcttttacataatgatttcatgcgctttatatttttacttttaactgtaagaatatgtatgatttttaatttttcaacaggaataacacaaaaacgaaccttacaactttattcatatatttattcaaataacctacacatccctctaaatattctaaataaattctcagaaatggtatttcccactttattttcacatatttaaacaatatttatcgtatatttaaacaccgtttaccatatattttaactttatttatcatatatttcaggctgctaaggttaaaactaaggttgttaaatcagaaaaaggtgaagatctgaacaatgaatctccaacaaaatcaccctcatctaagagtagaaaggccgttaaaaaagcgcctaagtcactaactcaaacaaaactagattttgcaacaccaactccctctcctgctcctgccaaatgggcaaaattacctcctctaggtactattaacgtgttttatttgatttagacccgaacgagaacataggtgaagcatttaggaaaattgttgagttgagaaagaaatctaatgtttatattggagcacacgtttcagcctcaggaggaccagacaattcagtaggaaacgcatacaatattctaggtacattttataatattatttttttaatccctaatgttattgctaggccaagcgtttgctcttttccttaaaaaccaaaggacgtggaactggacagatttggtacatttgaataaattatattaatttagtcgaaatctgcaattgagaagttccaaattaacatgttaaatcacaactacgatcccaaattcgtacttcctcacgcctcttacttgattaacgtggctaacccaggtacttaaaactcatttgataattcatgattagatcccgaaaagagaaaaagagcctttgataactttttagatgatattcaaagatgtgaagtacttggaataactctttataactttcatccaggtacacacctgtcgggttataattattataggatcaacttgcggtttatgtgaaaagagtgaaggaatacaacatatctcagtattttatatggttagtaatagtattttaggactgtattaataaggccttggagatgacgaagggcgttacaattgtattggaaaacgccgcaggacagaagaacgtcattggctctaagtttgaagacttgagacagattatagataaagtcgaagataaatcaagagtattctcacataattatcaattattatttatttaggttggaatttgccttgacacatgtcacctttttgccgcgggtaatttttaacttaatttttatcactcaatattatccaagttccataatctttaacaaattttaggatatgatattagaacaactgagcagtttgatgaagtgatgaaggagtttgataaagttgttggacttaaataccttcgagcagtgcatttgaatgactcaaagtcagacctcggtagtgggcttgataggcatgaaaacattggcaaggggaagctttcagagcagacgttcaggttcatagttaacagtccgtactttaaaaacatgcctataattcttgaaacgccagtccctgaagggaatgaagaggtgtataagcaggaggttaaactgatgtatagcttgctcgaatagctcattttattttcattttaatttttttcaaaacacatttaaactacgttctaacaactattaaaacctttttaatcagttttaaaacagatataatatgatatataaagattaagctatgttctgataaaagccgcctatgggattcgaacccatgaccttttgattacgaatcaaatgcaataccgctatgctaagacggctccgagaaatctttaaatcatgagctctaatgccacaataaataatctttaatatacataatgatccgaaaaactaatggttttttatgcttttaaaaatgttgctgtgtatctttccctacagttaattttacagttaaccacaagttacacatatggaatcttgataaacaatcgcacattattcattaattctaacaataatgaccactatcgcagcttaaaaacaataaaagtcagtttatccaataacgactcgggtccaaataaatatattgaaaacttccttaaatcttccctcagcaagaatctatttaagaatcaaacatctgattttacagcaaacagtgcagaattgaataaattgtaagtttcacgataaataaatccatataatttatcaggagcggtcgtaaatcctggagtgatattgtggctgaggaggtattaaagaacagaagacttgaatatactgaagatgagtcagctcccgatattatcaaggatcccttatatgaacgggaatatgaattgagaactaacccttataattacaggttaacgcctgagggaagggtgcaacttgaggatcacatagagtatttgcagagaactgcatgttcccatcccgtaaagtataaagaggaaactcctattctatggatagttagatcatctcatggtatttaacttagttatttatgtttttaggtaattactgtgacttactggagaaggacgaggaaaagatcaagtcacttgtaaatagagttagaaaacagtttagtagatcagaactacaaatacttgttttaaaagtgaacgtgaagatgccactctgtgaaatcatgttagaaggaacgatgactgatctggtaagaatattctacgctagaggaggcacactacaggtttaacttaactatgatttaatattttagtactatgttacacctcggttttggactaggtgtgacttgcttgaaatggatccaagacttgaggccaagtatggaaaggcaactgcgccaggactatttccacaatgggatgaagatgggatgatggaagagattatcgactgtatggacgtcagacccgactacgcattggtattggttattgtaataaattcgttttaggagtttaggtttcctaatgcctggcatgtaaagttgttattacccaagtttaaccagcacttaatgaaactcttctatgataacgttcactggccaacaagactgagagtacaaaaagcgtttgaaatgggcgttgaagactacagaacagtcattgaggaggagtaccaagaacttcagaagttgtctatggataaagaagggctgagagactcgtggttgtaagtatattgtttatttaacacattattttagcggaaagcatgccaagtttgattaaacaatattttacaattaaatttattcctcgtaaatttcctgaataattcattaagttattaaacttacgcaattggcgtcatcttcgtcagatgaatacgtttcattaaatgagctcaattttgatatgttttcgaaaattggctccactagagttaagtccttcggtgataatagtagtgagtgattatcctcttcctcctcagtaacgtttaattgtataaaaatacaaggatttttgaacaaatctaatgaaatttatgtaggtcaaacttacttgtatccttagaaatcgcgtgaaacatgattgatttatatggaaatgagtatgaatgtcctgaaaggtcggaatttagccaaattagtttcagatttgttaaataaaagttcccagaccctgaaaacatcaatagaatacaaaatttcataccattctctacattatttagtacaagagtgacatctgagtattgattatacacttcttcattttcagatttatcaagaaatttagaaacatcagtagaagtttcaattagaaaagttctatagtttagttgatttgagtttgatgattccataacttaatgaattattaatttaacataaagttgactccccattcattagattccttaataaatcaatcaaacattaacacattttaatctagttggtatgaatcaacatatttttttaatatttaaggaaattttattttataatgactattgtaaacaagtttttaggactttctttgagaggagattatctatcatattcgttaatatttaacaattctctccacaatttaggctcaattgacattaaatcctcttcttcagaccatttttctaaaattaactcagttttatcaattatcaagtccgaagtcgataaagaagattccacttctctggattctaccaacaatagtagctggaatgtcggaatttatcacgatccagtcccaaataaacataattttgaccagaataagttctacaaattctgtaggctcaagaccattatagaatgttcttgttgttctactctaaggtattttattacattaccttacacatttttagtacttctccgcttaccattgaaacgtctgagctctgtaaaactatcggtacagcttaattatcttatcattatttagcaaaggtatcaaattctaaaatttctgacattgatggagttgtaaattatgcttcatcagttttatcaaagtttatcacttctcctttaacaacgcagtttaacggtattgccacttcgtgggctactgcattgtcattaaaggtaagttcaaagtttaaaagatttttagaggaggcacagtcttgattctctcgttttatctgaaaatgatactttgaaaatccaagccagactcaaaaatgacaaagttgtcaatgatctaataactaatattgaacaaactaaaaatgacaaaagtcgtacgttccaaaatacatactaaataccctcattacaatatataaataatatataaataagtatataaatgtgtttatgatgaatttaggtttaaaaaatgcacttgagaggagagttcacaagctagtacaggactatgtggagaatatagtccagttcgttgaatgactggataaatcagtttccgtactttttcttccttacgaagtcgtcctttatagtcgctttaaatgatataatgttaaccttactgtccttcatcaggatgtcagtatgtacaataaattcatttttaactataattgtgtacttgctacttgagtcgtctgtgaattttacaatctcaggcttattttcacgtttgccctttacctttactccgtgcttgtaaattttactaggcttgacaacgcgcttcggctcgtatattgtgttctcaattgatggaatattatacagtcttctgggaccaattacgatattgcccttcttattgccatacttatcccgattgtgcttatctctaatactgatatccctgtgttgattattagttggatcaaactgtttattcgataggggagtcctaacttcagaatctaaagcaaaagggtcctcatttaatttaaagtagaaaatgttatgcgtagtttgcactataaccaagtttgagatacagaatgagtttaatatgactgcgttgggattgtaaatatggcgttggatcgtgtgaatcagcttcccttggtacttaacaataacaagagcagcagtgtcatatacgtagtatttaaagcttgttgagaatgctacgaggaactcgcaattaacgttaaatgatacactgcagatcctggagtttgaatcaaaccttggcaacgtgaagtagttagaattctcgtgatctgaaacgtacacattcccatctaagcagtagaatacacaccaaactttgcctcctttgaactgagaattatttggaaaatccacaaatgtttgattataatgtacagaaatctttattacatgtttgttgaaatctaggtacttaaccgttgacagtgagccgtccttaacattgtaaatactaaacagatatttaccctcagaaaagtggttaatcatcagctcatagtttgagataaaagccattgaggacacaataaggtcttggtactcaaatttaacttgtgaaacactcaactccttcaagtttaacagtaagatttgtatgcccacttggttcagtattgccacgacatcgccttgaggggataaaaaacagctattaatcctacccttgttcttgttcatcttcatttggcatagtttatatggtacattactgtagaagttatcgttaaacaagtcgatgtcagaagacctatctgagactgaggtggtatcagaatctctgcttgaggccatatttgagactggtacataccacaggtcacaatgatgcctgtatctgcaaagtgcaagagtcttagtactattcattgaaaccactgggataaacttggacacgcttgggtagatctgtttgtatattgactttttattatcgaagaacttaaaggctctgagtagagatatggagcctgagtttccagcgctaccaacaagtccatgaacatggttaacacatagagttctaatatctcctctaattggatatttaaatccacttactgaccaaccagctgttgtacctttagttgaatttgtatcaagttccttaatattatttccatttaactcatcattcaagggtatattgttggttgatttgttattagtgtacagtgtgactttactatctaggcctgctgaaaataatgtatcatcgttgattaggcaaagtgataaaacgtcgttgttatgctgagtgaacaaataggacattgtaagtgtagttatgtcccaaaacataacatttccgttagaatctccgctgaccagagtgttttctgatgaaatatacagcaaacaccatacatggacattgttttcctctaaaactccctgattttctgatttttcattttcgttttttactctttttctactccttgtagatgatatctttattaccttactgtaattctccttttcaagatcacatatcaagatcattgaatctgaagttccgcagaaaacccttccatcttcaactgaacataaactcagaattcttttattatggcgtaaatggacttttctgaagttcagttcttcgtgtttctcgttagattcgatattatcccaaattgagaatgaacgaacagagccatcatcacacgctattaaaatatctgaattgtgcgataggactcctgagaatatagctcctccgtatgatgtgcaggatctctaaaacacattttaaactattattagatacctttggccttagtaaattcaaatcccactcgttaattattccgtgaagacctactgtgaatagtctatagtctgataagctgtagtactctagattcttatatggaatccagattattgatctaaaagaggcgtcagaatctaagtctgagagggtctaaagaaaattataattaatatttatattaaaaaaatacctttaggtttgaatttgacgatacttcatatattgagacattgttggcgtatgaaaaggctaaataacgaccacagttagagaacgaagaggaatgaatacaaatatcatctaaatagacaatatttagaaaaatgagtttattattcatgattttagggcattaaattagtgaattccctatgtatcatctatcggtaaatgaacaatataatttgctatgattttgacagaataattaatatacattataatttaaaataataatacagaaggatgatgaaaaatacaaatttagatatattaattttacagatcccaatatgttaaaatattagtatagaataataaatataaaaattaatttttttaaaaaataaataatccgattattatttatttatgatcacgatttgaattaaaatatttaatcgtataacaacgtttcttacgattgaatttaagaatattataaaaacgatatatataaacacattaggattagaattatttaccaatatatacattttatatacaagacgatgctagtgatttatgaataaaataagtacaattacggggacttaatggaaaataatatacattaatagtttattacacaaaattatcaaattttgtaaaattcaattataaataaaaatgtgtaagagtatattttattaaaatataatttaactctatatttaatgttgtctcaacatcagcactatattaattcaaatattaaatcactaagatttttatattaataactgtcgtatcgttgtatattaatttgtattatcttaatttttcgatttaaatatttaattagatgattaataaattaagaaataatgggagtgaatctggatgaggaattggatgacatactaggtaatttgaacatatataatatatttctgatttaatttgtgaattattatcattattttattttataatttagcagagaggaaaaatgaggtttcaaggttaagatctagatttagaaataggattcccgttatttgtataccttctcataacagtccatttaaaatcgaaagatcaaagtatgttataattaataaaataataaatataatcttaggtttctcgtacctcttaacatgatgtacggtgaattcaaatacttactccaaaagcacttaaactgccaactaatggacgaccctcatcattatggaaaaaacagcacagtatatttatatgtaaacaataaaatccccaaaatgtcgactcttctcggtgatttattccgcaagcacaaatccgaagacggagttttgtatatggtttattcaagtgaaaacacactgggataacagaactctatgagtttcctctcgtataatatcaactaatttttaatttgatatcgtcactataacacccattccatattcgatcgtcaacacattcactaattattatgtttaagtattttatattactgtataattatttattatttatatttttcaatcattttcgtataatttttgtaattcatcatcattttgcctattccatctcatacaaccacaaattagtaaataaggttgagattctaaacaaaagaagcaaaattaggaataaaaataactctttgtatcaatatttattcattaataataacaacattaacaattttgttaaaaaggaacaaattcgagccgattctgaatcccggcacacctcaaaatccacttttgattttaaagataatgatttaaatgaaaaaattaaacaaagaatagaatctgagtcatcaaatttgttaaatgataatttaaataaaaatgattttatacaggaattagccagagttggaaagtcaatttaccataatataccaacacccactctgtttaaatccgtacctaatggaataaacctcttaaaatcatttaattcaaatgattttaattctctgggatgcaatggaagagattattttctggtaaaatcgcctgcccctgtagattataaacttctggatgattgttcttcttcaatatacatatcgacatatctagatgaggataaaagaatatatatagatggcatttctgatagtttagtatttaaaggtatcatatcattacttgtatcaataattggttggacaaactatctacaactggatgttgagctcgttaagaaacataaattctttaagaaaatcattgattatggaataattagtgaaaactcacttaactctattctaaatcacattaaaaatgagctgaacaaacaactcaatcccactaaaggatttaaaagggcgtcaatgttccaatcgccaagatctaaaaagaggtaaaaacacaattattcattagatttagggttgcggtgcttgttagtggaggagttgattcatccttggccttatggcttatgaagagtagagcgtttgatgtacacgcattctacttaaaagtaaatgatttatcaaatgggccaggttttaaatttatgtcttaaattactgtaggattatgtgcatcgaatgatatatcatatgcaatgcaagtttgtaatatattaggagtaacgctccatgtactaccattctcaaaggcttattctgaacatatattatctggtgtactggacgattacaggtttgtaataccatagttatacgtgttaggaaaggagaagtgccaaatccggacgttttatgtaatagcagaattaaatttggtgaatttttgagaatggcaattgattggggatttgattacgtagcatcaggacattacgcaacactgtgcgatgattttttcacaaaagaacagattaaatcgcccagttctctaaatgggtccacatcaattaatggatactataaaattaaaagattgtgcttatctaatgatacgttaaaggaccagacctactttctgagtagattaacccagaatcaaatgtcaaagttaatatttccaataggtcatcttacaaagagccaggtacacaaccacacaataattaatttttaggtgagagaatttgctaaaacagttggacttccaacatttgataagaaggactcttttggactatgctttttggaggacttggatatatcacaatatttgacgaaatcacttggggaaagtcaaggtccaattgttgaatatgaaactaataaagtcattggcactcataatggtttatataactttacaattggacagaagaagactataaacagctttttaaaccctaaacatgttggaagtacaccaaaatatgttgtaaagaaggatattgccacaaacacactgtacgtaagctcaaattacaatgatgatttttacaccaatccgaaaggaatcagatcaagttttaaagttaaagacatgttctggaatgtaccagactataaagaattgataaataaaatacaatctgagggatcagatgataattttaaatttaaggttaagttaagacacacacctaattatagccagtgtgcaattaattttgatggtgatgaagccactgtatttttaaaacacccagatactggtatttctacaggccaatattgtgtattttatgctgataactattgcatcggatcagcgaaaatggtcactaataatatatgagttagcagcagcaacaattttcccattgacaattctaaatgcagcattaaaatgatccagcttggtttaaaattttataatgtaatttatttattttaatgttattttacatttatatgcttatttaaaaaattacaaaaattattaaatggtaatttgaacacaatggattattacagacctcaacgtcacgggatgtcccgaaaaaagaaaatacttatctttagttcaataactgcagttattttagcagtatcagtaactatcgcattgattttagtatttggaggcaaaaaacatgattgtaaaatcgatagttcgagtgaacatagtagtagttctgactcaccaaactactcaccaggacattccgaaaatagttctggtcaatcagattatgaacaaccgcaagatagcagtagtgaatcggatagttataccggtgaaataaggcgtgagagaagcccatcaccatttattcattattatggagacaaatgggatttagaacgaaactcacggaagtctcgttcgaccacaaagaagacaaaagtgcccagaacagaagggacaccatcaaaaacaaaacgaaaagataaaccgcctgctagacaacctgctcaacagcccagtgctcctcaaaagcagcctcccagtaaaccaccaagtccagtacaacaaccccaaagtcaaccaagtggtggacaaaagaaggcacctagtaaaccggcaggtccagtacaacaacaacctattcaaacaccaaaaagtcaaccgggtagtagtcaaccacaatgtgaaaatcggggtcctcaatttattgtaagacccatagtagatcatacaaaattaagtctttcagaaaaaatagcaagagtattttcaagaaatgtaaaaccaccagtgtcacaaagaagattccctcctagaaaaaacaaatataacagaataacagagagtcacgatacggatatgaactttgacgagattttcaacccagttgaagagtataaaaatgacgatgaacaaagtagttatgtaccatttgaatcaatatacgagttggcaggagacaaatgcagaataaataaagcttttcctcctaaaggaaaacctcaaggtcataaatttgaatgtgtcgacctggttatgccacgcccatcggctgattttaaaattattaaattagttaatactcttgtgattagtccaagttcaaatagaaagaagatttgcaagataacatttaataacaaggttctagttgaaaaactcgatgacgatatggagtttactgctgttttcgttgagaaaatgagaggaataacccttatttctgtaatttctacgcatgcaaatatggaaagatctgcgatacagtttgttttgacgtcaaatggcagattacagatacttacagattaccttagactaatggtggatttattagcattatcaacttcataatagaattaaacaaagcttaacaagtaatgtatatatttgtgtacacactacatacaaaagtatattatatatatacttgtactatataatatatacatttacaaatataatataaatggtattacgtaatatgtatatttgtagcataatatttatatttgtagtatattacatgaagagtatggtattttacgttaaaatatattagatatccaggacctatagaaaaatttaatgtgtgaaaataccgcaatttgttgatgtccttttttaaatcgaggcccatgcctctaaagtttgattccggaacaaattcctttactccattcgataaattttcaagtcttgcacctgcgttgttggcatattttgatatagtagtgttaatgtttttcaaaattgttttagagtcatcggcatgagtatcatctgagctttctgagggtttaaacttatttttgttgtataatacatatgctagcgatacaatgggaacaattgaacctccgatacagaagtatttgaatgcgataagtctgttagaaagtgattctggtcttctgatttggtacacaggattagagtacctaatattcagtaatctgtttattcttctgaaaatgttataaccccaaactacattgccaactgctaaagccgataatgtataaggatttaatattttatgtaaacgtttctttgtgtttgtagaatcatcgtgaatattagtaacatcaggagtagaatcagaattgccagacataatattaaattaaaattaaatttatgtacactataataaaaatatattatataagtggtaataattaaataacattattatatatactgatatcattgggtgtaatttatcaccttcgatatggtttattttaattattaattttaattatattaaaattatagtatttaaatttacatggaaagatatatatcactaatatttgtgctatcgccagtaatacgctttctgtgtaacccgggtattaatacaccttttaaattaatttttagaacgaaaatggaatcaaaaacgaagatatacaggtattaaaagctatctaaatcatgttttataggacgttttttgacatattttttaatatttttgactattttatataaattatctaaaaaggaaaagaattgttttcaattattaaatgtgtcacccttctcatcatttgatattatcagaaaatcattcaaaactgtcgcatttaacctgcaccccgtaagttttacaaaaattaatcctgattaggatcgcaacacatctaaaacatcaaccaccgactactcaaacttagttgaaaagtataaattcatttcatctccagataatcgctacaaatacacgcgattctatgatctggttagaaaggatgatagtacgtttaattctaatcgtagttttcaacttaatttttaggaacgtttcatgaaatctctatactggacctcatttccttatcactcttgaagagttttgtttccattacaaccactttttttatgttgtttacaaacggagagaaggtactatggcatccattgctcgtttatgcaatttttatgatgttttttgatctttatctccgactgtcagatgagctgtttttcacaactaagctccctttcattaggtactatgttacatttgaaatattaatggtattttcaaaatttaaacttattttatagattttcaatgaaattaaagcatttttcatccactactccactttgtttcctgacgattccaggatcttaacttcgattggagctaccatgctctcaaataacctaaaggttattgacaaacttgattcaattttgaatatttttaatttcccggcattttctaaagattttgaactagaatttgacaaagagaaggtatttggcgaaattacagaaaaggtagaagagactagggtatttttatccactgtaacgttggttcagaacaagataatgaagatttataatgagaaattcgatgtgtcttggtcaagagcatcgaaaaggaagtatgaaaaactatcgagaattggagttcgtttttgcgtatcatatatgttaataggagagatttactatggaaccaggttccattttatcatttctttttatatcggcgataataattttgaatttattaaagtagttacgttttacttaatgtacccggtgttcctgttaaatgagtccacaaaggtctaaaaattgttttgagtatctaaattaccttaattgtggttacgttcgtctcctgaatccagtaaaacgacctgtggttgttacttgtaaattttagtacataaacctctccagtggagcattgcggtaccttttcaagatatgcgtcgtcgaatatatacaatgtatcctataattttgttaggtatactaaggattcttacttcaacattggaatcatctcttgttagccattgaactgacaataaatcatcgtctccctaaaaagtatttatttaaataatgtttaattatcaataaatattatttttatactttaaaaagtcttaacgagccttttctgaggtctggtgataccaatttatcgttaagaatacactttccagctcttatttgacaaatgactcctctatcacttgtcatttttaaaaatatatcaacaaaaattacatttaaatcataaaaatatataataaaattttataattaagtttaaaccatagattagtatgaaagtgtgggaaatataagattacattgtaggtgtgtggagataatttgtattattgaactttttgagattttctttacttttcttgggtggaaccaccgtgttatcgaatatattcttctgctcaacttcgacactaacacctgaatggtggttaactagctcaacacttgaggaacttgggtgattcctgttcttggatttgtggattttacctctgtcatactctaaatcttcttctgtaggctttggcaagtcggggtcgatttgttcatagagtttcttgtacgtttctaagtcctcggcgtcagaccagagctcaacttctgccacttcattttcatctccaatagcatcaatgaacgatgtgtgttttaaactacatttaacttcgttatttaaatctgtatcattatcatttgactcttcgtttaggttatgacttagattgggatttagatgatcatctaaatcgtcaatagggtccgattcttttttattttgattggatttttgtgtttgttcactatttgctttattcattttggctagtgaattgattttcattttcaaattattgatactttcaatttttgacagacgtttaatgtttaataaattgtagcttttaaactttctgtgcctaagaaatcgtttaaaaattgtgtttccaccaaaatttgacagtatatcaatttcagactgtttaggttcaggaggtggaacgcgttctgatgttgagaattgagattcctttaaaatattactataggagtacagatttagtgctgtatcacaatctcctactgattcattgttaatggagtagaataatagataaacgtcgttgttatgtgataatactgttgactctgaaacacactgaattattgaatcgtcaaaacggtaccagaatccgtgtttccccttaataaaggttatgtagtgtcccatgtgaagtgactttccaatatgacatacaattgcgtataaatcatagttcaaccaggtatatgaatcctctgatgacttgagtgagattgacaagagttgtggaaactcaatggccttcaatgattttttgtagccgttagaatataaattaaaccgtttcagattaatgtttaatattcttggtgctttatatattgaaagtgacttgtttgcgttctggtaacccttgcaattactacaaaagtacttattatcgttggttaacttttctggcaaaacaaactctgacaataaatctattagcctattacttttcgtgacctcaacagccaaatcgaagaattcttcaaccttctctgactttcgtgagcagttattacatacaattacatttctaaaatacccgccaaacaaacaccctatgactgtggacattatttggtcgttagaaataaaatcctttggtttagactgaccttcagactcatcttcaggtttctcagactcgtgcgagtttaaataacatgcttttgagagagaatctagaaagtgtttcaggaatatgaaggcgtcgtcttggtggcctagcttaaatctggcccatataaatttttttgcgatggagtaaaacggattattcagcggattcggtgattcgaatgattgtttcacgtaattttcaaataagcacataatacaaaatatatccttctcataatgtgagcatgttttagagtgatatgactttaggagagacgaggctaaaaagggagtatgtgtcaacacctggataattacgttcatataacagatgttgattcctgggttattcagcccagctcccattgtcattgagtcatcgtcccattttactttgggaaggtggtatattccgagaattttattgttttttaggttctttaagacaggaaaagttttaaatttattttgtgaatcttcttcatttgaatttaagttcgtatgatttaataagtctgaattacttggagtgtacttgttaaactttatgcttttattgtgtagttcgatcacatatggcaaatatgtcctcgcatttgacattataatacattttttgagaacatatacttaaaaacagtcatcacaaaaaaatgtcactggaaaatgattaataaggcgggattgtgtaatgtagaatgggaataattctagatataaaaattatagttattttttcttatgcctaagtataatatttttccaaagttaccatttctatcgtatattgataagattcatattcggtacatgcctggctctcctcatgatgacacatgtcggaaactcatgctaaacttgctgaatccttcaacttctaaacgttttcctaatctccaatatacatatgaattattaaagtgagttcaagttttaatgacacaattcagctataatgagaggcctgagattttcattaccataagacctaacacatctttgaggttttttataatttttatcaacacattaggttttatgctgactcatataacttagaagatattcataaagaaattgatgtatatcaatatgatggtattctataatgtaaaataattatgtttagcacatataaaatatactaagcacagatcactcgaaacaaattatgaagatgaagattaattttattacttttgaaaacggaattttaaattttaatgtgtagctatttcttcaacaattgttccgattattactaggacaggcaaatttgtattattagagtctaactttgggtcttccactgtaataatattatgtttgaatattccaacctttatttttattatatattacatctaatattttaaataatacaacgtcgttttctttcaaactgtaattaccactactattagttacaacccattcctccctttcatcgtcactaagcaaatttatttaacgtataaaattactatttataatttggcggcaagaattttggaattacttgaatatcgtcaaagaatccaatagaaactaaatcacatattattgttatacattcgagaattttgttatttattttaaaataccaacgtttaatgaaatttttattaatgagaattacgctagcattgaatatatcattaacagatgggtgaaacaccaatactttgaaattgatcttgtaatgtgcagaaccttctgtttgtaaaattttacattcgcaccttaaaaacttctcatctattgctaaaaccaatccgatcccatgtataacctgaatttttaattatttccccaatttaattgatatttacatactttgttaatgtatttattagataatttacgaaacaacgtgtcatcattattaaagtactccgaaacagtcagattaatgacatcttcgacaataaatactttaaacattatataataactaaatgaatataaccgtgtttattgtgggtacaagcaactaagaatcaaattaataagttcgaatttacagtattaaggtgtcaaggctggcttataaacgtatggtctgtttaaaaatttgagcttcttcaaataatttttatatctaagcgttatctttggcggtggtggtaaaagtccccgcctgtatattgattttacgatgtgactgattgggcttttgttgagattatctatatttttaactgaagaattcatctcttcgggcagataaacttctggagggtctgaatagtacgttttgtttgatattttcgtgggaacttctccagaaagaagtttagatacgaagtttctaaatcttgaaaccatttcggatgctttgttggaaggtttaaatgaattaatactcttgatatggttcacatcgttttttaatttttttatactttttattacagctttccttctcttatcttccttaattagtttcatcttgttcctttgtgttttagacttcctccctggcaactttttatacatcgtctcctcactaatttcttcttcagtttctgattcatgttcttcatttaatactttattgacttcatctaaatcaaaaacattgtttttaatcaagttaatcaatgcctgtttccttctaaggtccaatgactccgggtccaatgaaggaaaactattttttataatatcatctatctgtttaacaccctctatagtttcatcttcgttgtttatttgaactacgttagaagcttgatttaataaggattgataatcctcagggtttggattgtaactctggcctgggtgtgggagttcaactggaggtattaattggttaatattctgtattttatttcttttatccttggagttaaatatggaatcatcccaaacatcaaccggaacatcatcctataatactattttatgcataaaaagtacctctaaaggtttcgaatcaatttcaattttattattaaaagtgattttattctttaattttttaatcttgacatgttctgggctgtttttattcttgtagtggtttgacttccttacttgcgttaatttagaatttcttaaggacaatttacctataatttaatgtatttttaataagtattttatttcataccgaatgtatcaatattaaatctaactgcacttggattatccctttttcttgaattaacatatggttccaggaattcctcatctattttggaacttgttctctttttattcctcttacttcttttagtcattttaaaatttattataaatataaatttgaataaataaatacgataataaataatataaatttataataatgtatgctatatgtgggaagatattataattcatcttttactgtatttttccttctttcttgcttttctcaaattagtcttcttcctttcagtccttcttctatcaatactaactagatcgaatttcctaagtatatacttaagctttggtgataagattctatataggtatcgaacgagtgcgtgcctaattgccacactttgaccggatattcctccacctttagtctttgcaacaatgttgaagttcgtattaatttctagtttagataacggttcaagtatttcccgaagtctaaactcgttatagtacacatattggtatccatctctattattaatgattatgtttccgttaccaggttccagatacaccatagcctttcccctcttcctctttccttgctcatacagtttaatccttctttcaacgaatactccactattaataggtttttcttctaaatttatatcagaatctccttttggtggccttgtgtgtgtagggaacgcattagtcttaagctgtttgcttcttgatctgtacactttatggtatttcagcggacccaaatcctgcgtgttgtaaatttcaaggtacgttgacagaagtcgcctttttaaaatgggttcaaagtcgtaaaacggatatattacttcatttcggggatcatgaagcgttttaatactggcgtacatttcatagtccacctctccatcagactcgtaatcatcttccaaatactccggtttcttgtagttctgcaataacgtcaggtcgtgcattggtggcgagggagttctatccttgttagggtcgtttttaatatattccaccaatttatccatcagagtaggaatcaaacttaaaaaatgttttctcacatttagcgtgttattgctatccggaggaaacggcttttcaattacattaacgtattcatgatttagataaaagctaggcctttcatcatttttgttatgataactgaaaacatcgtagttgtacttgttgatatatgttaggtagtgcttaagatatccgtaagggtcaaacataaaataattcggattaattttagatacaggaagttcatcttttactacattctcatctttttctgcactcttgtatgaaacatcagacgattcactttctgaacccctgtttcttttatattccttaattgattttatatccttttgttccaaaatactaagcattttctctggttgaacgggctcttcatcttcctcacgagtaaagtagtttgttgaagttgattgagctacgtcacctattgtttgatatcctgattcaagatatggcccttccattctattttcgagttctgcttcaccaagttctggcgagattgcatcaattttagcactagacatatcctccatattaagagaaatgtcagttgatcttgcgaagttatagtttctagggtattttaaaaagtcaacaatagttctacatccttcaggaagcggttgattgtattccgtaagtgaatatgatggccctttatacactttatagctttctatcatggatttatatatttcagggtcaaagtggaatttatcgaagtttgaaagagatatatccgttggtgtttcagaattagattctacatccgttgattgaacctgactaaaatcatatccttctaaatcattatcgtccgggatgggtgaatggagcaatttcgacaattcatcgtcaatgttatcattgttttcattattttcatgtgaagaatctgacaataattaatagaagattaacacataccttctttaacagagtaaagtcttgtgtatatacgaagtgggcacctaaatgtatataaataaattgaaattgattataaatgattacctatatatatttttatgggatattgagaatctggttggagataaaacgaatgtgttacaagtatggaatattgtacaaaaactaataaatattagaaacagcagcttattttttaataatacaatttgtaacatatctagaatgcgataaatagtctatgattaggaatcatatttaaaatgtgtaaaaatatatgttatgaaatttgatattttatggtggagcattgtagtaaataaggttaaagtactgaaaaatcaactgaaatctaatgtaaaaattaatataaatttaaataaaattaataattaaataaaaataataataattaaatgtaataataagaataagagaatataatgacagaaaaacatatattttaaacaaataataaattgcattgttatattaaaaaataaaatttaaaaatgaattggaaaagcaatgttttatttaatgttatttatatgtagggtcattacattaaaattatatacatttagattgtttatccgtttatttttattttctaaaattttatttttttattactagcgatttattcaaaacgtttttttaaagtatttaatctaataaatatttacattcgacgagatcgtactcagtttgaaccttttatttcagattaaacctttaaatccaattttgcaaactagccatatttttataattttattttaatgacaatttcacatttaaaaatcttgatgcaaacttacattttcttattacttcatgtcacgtaaacatgaatgaaaacacagtagttttgccaaaatttcacgactttccccagaaagtctcaacaaattctgacttccttttacatagatctcaaaacgataactgcagatctgatttaaaatcggttgacatgtacattgccaacaagaagtacaatatcagtcacaacattgattacaactcacatatatttaatgatacaccttccacaagtaagagaccattggctttaccctacggaaataaaacgcaaaatggtggtgaagattttttgactagaaaaaggagaaattacacctcccaaccctccaacagcttagtccctaataatagtgatctacttcaactcatagccaacgaagaccaatcgattatagataaaataaaacatgtttcaaccacaaactataagaaaatcatggatttattgaatagatcaacatcaataagggaattccaaaataatttacaagctttagtactggatatgtgtatcggattatacactgataaatctcgagacgaaactgtcaacaaccttaaaaaacgtgttaattatttaaccaatgaaaaggcactcttatcaaatgtaattaaatcgcaatacgaatcaataaaggttagttcagataatattaatggtgtttagaaaatgaaggatgaaaactctaacgcttcgaaaactgaagaagaaaagcaggccctcaaggcggaattaggtagattaaagaggataataaatacgatggtgtacaacaatgataactcaacgaattttccacaaattgctgattatctcgataggtactttgaaaatacaataataattattataggaaaccacccgatgtatgctaagattccagtcttttgacctactactaacataatttagttgaaatatatgtatacatatctttttattttatttttttgttctattgatttatgtaatgattcttgctctacacaatggggaataattttctataaaaaaatactataatacatttattttacattttcaattattttattccaattacttacttttttggccagtgattctgatttatggtacaattttaaatctttattgagcaaacatgttaattaatacagtaatcagtgttgtattcacatatgttacatttacttatcgcaaactttctcaattctaacataaaataaccattagaatccactcttataaaactaacagattatcttgatcttcaactaaaatgacaggctcgaatcacctaatgtggaaactcaaggccagcacaggtccatttaacgagttaaacacggtaaatctgccatgccaagtaagtgtagtaagagagaaattaaaagttcactttggactctcagaatcaacacatatcgacttcgtagtatacctagaatctgatccggatgttgttttgtcagaccattatacactaaaaccagactctagagtgtatacaagaaggtgcacagctgaagaagcatcatcactgatttcagaagccaattcggtgttcataccagatgacgtagaaggagaaacatttgggtttgaagatgaaggggatatggacgagctattccacataccagaatctgtacctgagggtgtaaacgccacaggtgacaagatcgatgaggaagagtcgagaattagagagctaattcaacaacaaaaggtgcatgaaagtggaaaaccacaagttcaacttgaatattacaaaaagatggctcaaatgcctccacaaacctatcaatcaggttttcctctagcagggcctggtcctacggggtttattccaggctcatatgataccactgacactagttatttaagccagaactacatctgtcacatgtgtggacaaaaaggtcataatataaaggactgcactaatatggatggtaagcgtctttcgaagaaaataagaccgtccactggaataccgacagactttctgactccaataccttcatcggatgttccaaaatacgaagaagtttacattctaaaaggtatttttatatataatcacattctaactatatttatatttatagttacattagaaattcggagaatatttttttagatggttcatttgcaattatgcgggaaatcgagtcagtctcaggaggcgctttctttaccaagacagtagatcagagaatacaaacacagcttggaataagtgaaaaagactcacaagcactatctaagggattcaagtgtactatatgtttatgctacttcaataacccagtaactacactgtgctgcggagaaactttctgccttgattgcataatagggaagaagaatcccgctttcaacactaacattgtttgtcccacatgtagaaaatccattaagatgactgatctacaatctaacacctcactgaaaaaggcagttcagtcgctcatacttggaaacgttgatgtattaaagaacgttaacaatgaaaaagaaactaaaatggagccaggaaaaggtatttttaaatgatattcacttgatatttagaggaaaaggtagaaaaatcatgtgggatcaacgtagaaagattaaagaggtatttagtgtatataaatatgtaccttcaggcagaagttaatggttgaaaaatatctagcaaagtatcgcacatatcaaaatggagcttagaaatgtttgtaaagtctgattttatatatgtatatgttatatttggcgtcaaatacagatgaatttatgaaatgtgataatgttagtgagttgagatgtgtaaaagtaaatgtcaaaaacgagataaaaaaatatgtaagaaaaaaataaacagctgaggtgctgaatttgtagatttaaaacgttgtggatggaaattttgagaaaatataggtgatctgtagaatcatgtaaatgaggggtaaaaagggtagtttgatcatagattttataaacgtagacaaattaaaaaatattaggaaatatgagtaaatgatgaaaaataatatttggaaaataaaggggtaagattttgtagtaccttcacgattaatcatctgatgctaatatagtgcaaagcataaacaaaaatagatattttataataataacaatccagatactttcattcaaattattttacattttttatatatatgctaataatataaaccaattggatatacagttttaatttcactgatttcgcacgtttttaaactctgattgttttctcgtcgtggttttggttaattattaattctatcagtttattttttaacactgataattcccttaaagaatatccagtcggcttacagatattctgataacctctccagttacaagtatagtgtgcatgtgtcgtcaaatttgattaaattctatcaccgttatcgttcgctcagcttttgtacaggtttttaacctaacttaatctgatcttataatgggagattcgcttttggatacagttgtatttaagaaaattatttattgcatcttagatgttttcgtatcgttacagtcatttttcatcttatctcagcagatttaatcgcataaaatttaacaaataatttgtctttatttttaattgggataatttctaatggaacttaacttggacagtatcatcgaacgactgctggaggtcagggggaaccgtccaatcaagtcagtacagctaagcgaggaggaaattaagggactttgccataaaagccgagaaatcttcttatcgcaatccatattgctggaattagaagcgccaattaaaatttgcggtgatatacacggacagtattacgacctcctcagactgtttgagtacggaggcttcccgccggcggcaaattacctgtttctgggagattatgtggatcgaggcaagcaaagccttgaaaccatatgccttcttctcgcttataaaatcaaataccctgaaaatttctttttattacgtggtaatcacgaatgtgcgtcaataaatcgaatttacggattctacgatgaatgtaagctttttgtgaattaaattctttttaggtaaacgcagatatagcattaaactatggaaagcattcacggactgctttaattgcctaccagtcgcagccataattgatgacaagatcttctgtatgcatggcggactttctccggaattgacaaccatggatcaaataagacagatctcaagacctactgatgtcccggacaccggtcttctctgcgatcttctttggagcgaccctgactcgaatactacagggtggggagaaaatgaccgcggggtctcatttaccttcgggtcagacatagtggtcaacttccttgccaaacacgaactggacctgatttgtcgtgcgcatcaggtggtggaagacggatacgagtttttttcaaagagaaggctcgtcaccctgttcagtgctcccaattactgcggagagtttgacaacgcaggcgccatgatgagcgtcgataagacactgatgtgctcatttcaggtaatttatcaccttgaaccatttagttattttattttacgattctgaaatatcactaactattgataaagttaattctgactaacacactgtagatccttaaacctgttgatcgaaaacggttaaaatgaatcgtttaacaatgttaatatattttaatgttacttgcatgcatttagtttacaaatttatatagaaatttattttacacaactattttataaatttatagtagaaaattactttacatattagtgttaaaaagtatgttacaagagggacagagccttatagaggttcgagtccagaatattgtagcccattagcctcagaccgtagtgtttcaaaataaattggaggaccttgaaaagaacctataaaaattatgagataattatgctaggaattacacacatgttgtcttgcacagtttgagacgaaaatagaaatgcacagatttaaaccgggaactccaaaaacaactgagcctgaaacgtcagaatggccgaagccctggtaaacattattatcagtgtccagaaacgtaaacttttgaaacccaagtgaaaatgtaggtttaaacaatcctgaaaagtattacaaataagaaattaaccaaataattgtgaataattttgtggaaattgattgcaattagtacctgcaaagatgcgatttagaaaggaattgtcctcgttgttgtgttgcatgacctgatcaagcaactctgtagatatgagtgaccctgaaagaattgagtagtagaaaagacaaagggaaagagagttactccgggcattgagaaaaggaacggaatttttgtaaaacttaggatagtttgtgttaacagggttaatgaaaggacagttaaacctaacaaagtcggggtaagtaaaagcggtaggatgcactggagggttttcagtaaaacaaactttattacgaattctcaccatcttacccatcttcccaataacatttgatgatagttggtcatttttggatgcattttcaagttcattgttgaggtttgggtcatcttgggtgctttcagacttcctaatctcagtgaaattaatgctgcgatagttagggtcctcgtagtcacacttgatggatgagagtcggtcaaatgttttcctgaatgacagttcaatttgctcagaaatatcttcagaatctgagtcggaaggggattctgtaaaaatgacactgcaatagtcagtgtcagggtactcttcctgttgtggtgtcatcatcttagaataggctgggtacagactgtcaagtgaggatgctctcaaaagcttcacaaatctgttgtccatagggcagtacttagttggaacgtaacagcgtttgatttcgtcgtccgggaagtccttatcatacttatagcagtagcagtagtaagttgagtcgatttcgcctttatcatccctgggaatgtcaatcactgtagactcaaatgacaaattctttctgtattcatcaatagttatgttgagggtcctcaaattactgtcaagtcggttgtcgtccagtgaaacaaatttaacatttctgtttctgttgtcatcagaatctgaatcgcttgaatcgcagtagctcgagccagatttaggtgaattgatgttaagatcaatgtacttagaatcttcagcctttctcgggtttgaatttggtttatcttccacgtcagaactgtctgagtatctaaactttgagtcatcttcttcgttgcggtaagcaaattgtttagtttgtgggcctttatcttcttccccatcttcaatgctaccatcatcactggaagttgagtcgctatgttcaggggatttcttttggccagtgttaaacaactggaatgttggtaagtttttccaaaacaccgaaacactctgttcgaaaagaacgttcagagtgtcggtgaaattgatagcagggtttggttcctcggaagcagtatgttcgttatcttcatttgattcactgtcagattcgtcctcatcagtgtcaaccatgtttggaaaaagaaaatttttgttatcgatgccgaccattgatgccaacatgagaacaaactgctcagttggaacttgagtgaccctcgtgataatctcagataagatgaacccatagattatgaacatgtaatcagcacctgattcactgtggtctaaaaactctgcattttctatacaagaaagcatgttctcccgtgaggtaaacagatcaaaaaacgggtactcaatgtatataactccacacttgtggttgagaacatctcgaactgtgataaattcttttttattcttaaattcaggccagtagttgtgaaccctatcatccaagtcgatcattccgagtgatgataagtgtaaaactgcgacagaaagtaaccctgaggtgattgaaaatagtgggaatagggattcgtttgaaatcggtctcttttcatacttgtgaatattaccaaatgagagttcgacatctattgagccgttgtgaataactgctatttgaaacgatattaaattgtcgttatcttgatacaaatgcctcagtaaatctgctatccttgattcaagcaggttcttgctattaattaaaatgagttctgaaaatatcctaaagttcttattcctaacaagagagtcgttcgacagcttttccaggagttcataaaatgtatagtggactcccatctttagaagtttgtgttttagtacgttaagtttattctgtagcagtgggaaaccgagtgctccatagtaataatttagtggagagtcataaacagaatacattgcaaatgaagcattcttgtatatgagatgtagaaatggagcaaatgagtctacagttcttgaaagtgaaagatattctgccatcaccttgaatgaaagtgggacgtagttaggtgccttctcgaagtatagcgtcaaaaactcttgaattagcttgtgaaccctggcctgagcctgcttaagatcattaacaatattggaagacatcttggctccaaaagtcgttctatgggatgacaggaggatagaaataagggaattgaagagtaaatcgtagcgaaatggatacatgttcagtagggtaaacccgctttcaagcaaggctgatgttaatccgagaaaatcaaacgtgtaaactgatatgtaaagtttacatattcccagccgctcaacctcatctatgtgtgttgtaaatccccagtcgagaaacacagggtacactttcttgtccttttggtcatatgtgagttgtaggtttcctgggtgtgggtcagaatggaaccttccgcaggacatggtctggaaaaatgcaaagtcgtgaagatcatatatcatttgcatcatgttgacgttgtgtttttcgacaaactctttatctgtgaacttgtacaaatcatagaactccattgttataacatgacgtgaacagtaatctgaatacagtttggggaccttaactggaactttagatctatacacatccacatgtgagtactgtatatttgcagtctcaacaacaaaatctagttccttagcggcatatgatgcatactcttcgaaatagtctctgatgtaggggtatattccagcagaattcattaacgaggcgatcatcttgaggatttctatatcatttaacatgttctgttcactagatttgtgttggaccttaactgccactagagatccgtcagctaaccgtcctttatggacttgagctatcgatgcacttgctattggaattgaatcgaaacttgagtaaatgtcgtccatataccccaaatcctcctctattgtatctataatctctgaaaaatcactattaggcatgacatcttgtaattgtgaaagtgcttccaagtaatatctcggtaggaagcctgacttagtgctcaaaaattggccaagtttaacccagcatcctttaagggttttaatgttatctaggattgattgagccattttcttgtgcatattatcccagtacttttcccgttctgaattggaaacgaatgttcctacaaaacaacacatgttccactccatagaaaggttagttaacctaataaagatatccatggacctctgaacagaggtatatttctgttcttgtttatccttactcctagcctgtttaatttcctccattattgttaatattaggattttatatgaaactaaagtttataatttgagttggcttaatattttacattttttaacacattaaattaaaaatataaaaattaatttaaaataatatttaaaattcatttttataaaattcataaatattttacatataaataaattattatcaaaccatcattaccgtatggtgataaatcagtatatattcactctttttattcttctaaaatgtagattattccttatatatttagattataattttttgttttaaattaatgtatgatttacgtaaaaataagtcccctttaccgggaacgcctgtagaatcctcagaaaataaagatcgagtacttcgaaaagttagagaattatgcggatggagtcgtccttcatttcctggatcccaaccgacctctctttgcaggtttatttaaaattaactattttatattcagagaatcaatatcgctgttgctaaggaatgactatgtagtatgtgaaaagtcagatggagttagagctttactcttatccgcctctggatctattttcttgataggaagattggaggaagttcatgaaattaagatgaaattacccgtgagggggaatttatcgcaatcgcaacagttgacattgctagatggagaagtcgttatggtatttttagattcttacgcattcatttaataggatgaaaacattgaagataattctgtatcatatagatacctttgttatgatggaatttgtatacaaaggaaatctttgaacaagatgaaccttatggagagactagcttttgtttacactcatgttatagtcccgttgagaatggctgggatatattcatctacacctaacaagcctactgatggcactgataactcagaagcatatgataaacttgaaatttacttgaaagatttcttcgacataactcaaattaaacatataaataacatatcagtaaaattaccacacatatcggatggactaatatttactccagttaacataccttattcaccaggaacatgtaaatcgcttctaaagtggaaacctccacatctcaacactgtatgatttgataatttcatgaatattaggttgatttcggggttgatgtattatacgatgatattaaaagaccgagattggtgcaacttttcgtatcagattctgtatgatttattgttattatggtgaattttagggaacaagggtattttataacgaatttctggctccatacggagatgtgtacaagaagatcatggaagttgcactgtaagtaatataaactaatttttaatgaaacaggaccgaccaaataacacaaatcatagtcgaatgctcttggataacagattctagaatttatactttcataccaaatttaagaaaccctaaggctgacattaaacaaagatctacgcagagtttaacagaggggaaaatagattatgattttgataacggaacatggatagaaggaggttggtatgcggaaaggataagagaggataaaaacctaccaaaccatatatctgtagtaaaaagtgttaagtccagcatagaagatgacataacatttgagatgttggttgaggaggtagaaatatttaagaaaaatgggaaaataccattatacaaaaagagcctgttgccgcaaaagtacgaagtcttgtaattttataatcatgaagcagataatgtgaccagtattgttagaatgaaactatacttgcaaataaatcatgtaatatgataaattgactaaatatctttaattaattataatttaacataatattagaataaattctataactgttttaaattaattggaagtttaaaaatttaagagtaaatgatttttaatatagtgcaatcatactgagacatatgatcagatattttattttatcagtattttataacatagtttggttatttttatagtttctattaaatggttcaggaagtttgtattttatgtcggtaatagctatccattgtaactgaggttaacatgtgtgtttaatatcacctaatatatcacatttttgtagaattccactaatattaattaagaatatataaggatttttgaagaatttcggctttgaataaattttactgaagatttatattaaaacaatggcttggtcaactaggattgctgtcattaatttattagtcatattattctcatctattaatctaacagtagcaagacaacatgttgacccaatgcagcacgatttacaagttgtaaattcaaaaacatttacaacgaatgttcaactggctcgccaaacaaatgtagtaggagcatatttctattcaacaggagacactaacctaacctcaacaataaatgagttaaactcagtagctaaggaattgaaagggatgattacggttgtcgcagttaattgtactgaccattcactgaagagtctatgtaaaagtgaacttggagaagaatactcaacaccggcattcaaggtttatccaaaattaccgatgcctccatttgacttcaaggttagttagggatttataagtttttttagaaaccacttgttaaagaagacgtgaagagagagcttttaaaacacctgccatctaatgtggagagggtagagattggaatgttggcgcacttcatgactaagcatgaattaatgcctaaggttctgttattttctgacaaggagcatccttcatatgtgtacaaggcacttagcaatgctttccatgtatgtttacaatttatttttcttaattgattattaacttattaacattgttaacttattgttaacttgttaaattactattaatttatttgttaatttagaaaaaattgttgctgggatttgttgacgctaacaagcacccagatttaaagaaggaatacggtgttaagagtttgccagcgatggttgtcattaaaccaaatggaaaaccccaaaagtataaaggagagttcaagtacctcccaatgttcgagtggctgaacgtaaatgcagaagctttcttactcggaggagggtattctgataaaggagacccggcaaaagctaaaccatggaaattcgataaagtaccaaaattgaatttcctctcccataaagatatttgtttcaacaaaaatcaggtattactgctacacattatataatactgttaaagtagtccgtcgttaataatgttttagggattctgtatcatttatctgactgattcagaattaaaaccgggagagaaggagatgttggtacatttgagtgaaaaatacacgggacaaattcatggaaagtggatgtggatgaacctgtcggaggagaaagaatttgcggaacttttcgaagctgtaaaggttctaccctcggcagtagtgtttaacccgaaaaagagactgaggtacttcctccacgacgggaatacatcagtaacgaagagttcaatggaaagaatgctggaaaaaatactaggcggagacgcaagattcacaccagtaaacggagatctccccaaattcaatacagatgatcttttaaccacagaagaattgtaaatttatttataaaaattgtaagatcaatatcgaatgtgtttgtaaatatatatagtagatttaaaatctgataaaaatgcgttaagtaaaaaataaaataaataaaaataataaaataaaataagaagtgtatggatattataaattcaagaggcttggctagattttttattttattttggtgattactaaccaaagctgtgccacatataatacagatacataagtacaactgtttatattttttcaccaaaaaatgtattttattaattagtttgattttaaaaattttaacattcatgtaatttaactatttgttgcatatacacataatttaaacctgatcaatcatgtattatatgtacaatttcaaacattactattttaacccatttaaactgtaaaatatttaacaaaaagcatacataacatgggaaatgcgaaatcaattgcaaattcaataatattcccagcccctcaagcctcggtatgctcaaatttaataatttttttaattaatgggtttttagtacgatcataaccttcctgaattagtatgggttccaaagaactttgcatctaaagatttaaacatcgacaaaccctcgtctcgatccttcccagttctgtttatccgatcacctcaaccctcaagcctattttttatatacttgcacggtatgtttcattttatttcactataatccacttggagtcattttcatttcatttctattcattttaattctcttttgtttaattctaattcatcttgattcaattatattcacctttattgacttttatttctcatggattaactgttgtttagcaaattgttgcgacattggactcattaaaccagaactgtatgatatctcggaagccatcggagcatctatagtagctgttgagtacccaggatacggattatctccagagatatcagtaactacaggaccctcagtgaatttgcgagttatcgctacattccatttcctactctcacttggtgttcacccaagctctatagtctttttcggtcgatctatcggaactggtatgtaattaatttttcatgtttttcaggaccggcagcatgtatagctgcacattttgtaaaaaaaggaattaaatgtggaggagttatattgcaggcaccatacgtatcgatccataagatagttcagggtaattttttaattcacatgaaggattctgtagagtacttcccgcttggctcatggctaattgataatttctgggatcttgaacaggcattgaaggacatgtcaccatcagtgccacttctgattatacacggactactggatgagatagtcccagtatcccatggacaaagattgtatgactcttacgaatctgagaataagatggccgattttcaacctaactcaaaacacaactactattcaattaatgaggtatttttaattgtttttatcgtttttaggatttaattgttccaatacggaagtttttgaacaaatttaacatatcggcatataatccaccaatggaaataacactacccaggtggtgcctttctaagtctaagaatgtgttgagaaggagaaggtcaaataactctgataaatctttcaagactacaactgaatccatgagatcactaagtatttcctattcttttactatttaatttatatttttaataatctttcaatttttcattcttcatcatactttagcgctaagctcgtctaggactagttcaatacatactagaacccaggtttccacagccagaacaagtgtgagtgcctcctcactacttcaagaatcaataccgcctgaactcgactcagacgtcaatcgcagcatttgtcatagtaatttctcatcatcactggagggcctgtgccaacgcaactcaatcaacaacgaagacatttcagacatggtaaacgacgcaatcactagaaataataatccatgatattttaatatacttcaaattttaatatactataccaaattaatagtacatcaaactttaaaatatttctcaaaaattaataaatatgaatatttacttcatgataaacattaaacgttaagttaaataacaaatcgaagcagagctacaagcccggtcaggttcttaatgtactcagtggcgcagtggttgtcggagaagtagtagactccgccgccgtaatgcttaacctcgtcaacaagttcgtggatcttcctcctcgttgtggatgacgcttctcgaatcacgttgtcgctaacgagaatgctctcaacagcacccagagtcacagcgttgtagatatcatcgaacccgaagcacaccttttcgtcattcatctcaagtctagtcttcagttcatccagcaccttaagagtattttaactaatgtattatagtatttaagtaccttgttgtggtcatggtagaaaacatagttaagtttcgaggatagcagagggttacttaggacttcatttattgcatttctgaatgtttaatttgtaatttttaattaatttgattgaaggttacttgtcggaaaatgaagagttacacaaaatgaatctactgaggttcttgtgaatgttaacatgatttctaaattttattactcagaaagttaaacatacagatttaaagaattagctttcatgtactcgaagaagaggtcctaagaatgggtcggaaaaaagtaaaataccttaaatattcccggccctgttattacaaccatccttagcactttaaaatccagttctgagtcgattttatccaaaatcatcctgtaaaatgactcagaagactaaaaaatcagttaggttcaaaaaatgtatacctttgaggagtttgaacttctgtgtgatgaggtttttctaataggtatgttgtggatgagtttgaaaacttctttagtcatgtactgagaaagtagaaagaatgaggcacgtccgttatcaataacctgcaatggatataaaatgtggaaactaactagaaaagcttgttcagcgttcattgaaacattgaggatgtgtgagagtttatcttcacatagtttattccattcctcctaaggaaaattattatgtcattagagcaaaccttgaaaagagtaattgtggagttaggttgaacatcaagagtgtggtattggccgatctgttaaattttttataaactggatctttaccttaacatatgggttttcgagaacattagtcccggtaacgtgaatgtcatcataagaggtagtgtattggacagactaagttgaaatttataaaaaataggattacctcgatacaaagccggattgtaaacttctttatctcctgctttacacaaatcgagttacaattttctgtttttatttttctagaaataatttattgagttataataacagtacctcgaggtaaatccctcaatcaagtcacctttgaaggcaatgttgtataaaaaccacagatcatcgtgagtctctaaaaataactttagttggattcctcctgtatgagttttatgtcgatgtaacaatttcattgataaacattatttgcagggaaaaataacaaatattatacaggttttaactagaattaatagattaaaaacaaaaaataaattttataattgatagtacattaattaacaaaatgaatcaaaaagtaatatagtatgtgaatgttgtgttgagtgtatagattattacataattttttattatttttacttgtaatttttaaaaacctaatttttattctatttcctactccgtagtatgtcatggccgattatagctgttgcagtgggaggaagtgttttggctgttagatatttatacaggagatatcccactttcttcaaatttggttctaccaatctatccaacaaattgtcgagtgatgatccctcctttaacatgggttctagactctccaaagctaatttgagtggctttggtcacaaaatgtcatttacagaagcttgtaacatattaaatatatcgtaagttgatttatttacaattttaatgtttagttcaacatctacaaaggaaaaaatccgagagtctcacaagcagcttatgatgaggaaccatccagacaacggaggtatgatttatccatttaaatttataattcttaggttcaacgtatctagcttcaaaagttaatgaagcgaaagactttttaattaagtgattgtaacataaattttattatattcaaatacttggtttaaattacaatattatacagtttattgagtatattttacacagtagattattatctggtccgttttttcttagctgtagacaaatttgtggcctttactggtaggggtccagctgtaacaagttggaatccctcatcatctgtgattatcttttgtcttagtttcttgttcagttcattttggagatcatatttggccatgtactcatcacacatttgctgaatttggtcaattcttaaaggttttttatgttcattttctaaaaagaaattaaatgaataaataaaaatacttttaaaaaatgaattgggattagaatatgcgaaaggtttgtaatttatctctaaaactttaggaagaggtgtatcagaattcaaagcctcaatatagtacagattaagtcctttctaaaactaatattagtttattaaattacctcagtgacttcaaaatttttatcttttatgttaaaatattcagaaagttccttactgtgtaggattatgtttttaatgtcagatttagtaattaatgggtcgagagatttgaaaaggaaattgtttttagatattgaagggcgagaatcctttggtttatgaaagtaggaagatgttaacagaatctaaaaattatttaactaaagtaaatatataaaaatacctgagaatagaaaggaatgttatcatcagttgaaaggttaagcaaatgaccaacaaaagtcatttatacaaaatattaatattaacaataaaatacatataaaaatatataaataagaaaataaactttataaatttaatattagttggattaggttgtgcaatgttaaaataagaagtataatatattttaataacttttgtattttaatttaattgtaactatgttgcagcaaaatcactgtactgtaaatacatgggtatttgacgtttccagatgtttagaaaatcacaacggaaccgaacttgctttacttctatccttaaaatgtaacaaattgtcacaagataatttatatgggctcaatgaagtttgtttaatttccgtataactaatttgcgtaggaaaattttcagacgctcactaaccagtcgttcaataagttcgataagcttatttcacctggaatctgccagtttttctcagattatctaatgctgagagtttctatcgcaaataatctcatggattgggatgatattcttaaaaagtccttcaaattactagagtttgtttctaatttttatggaactttagtctgtggcttgatatatacttggatgagaatcttacagaccaccactggcttgttccagtattatattcactctgtaacttcacgagtattatcggctcatacgtatgttttaattcgtccatatatgacaatttacctaatctgctccaacacaaaatttccaggctgacaaggcgaatgtgcctgttgtcgttgatggtcaagaaagtgacgatgaggacgacaaggataaatatatgaagcaagtcttaaataatgttagaagtaaaatgggtagagttagaggagatgaatctcggcattctggtatgaaatttaataatttatgccttattagcatatatcgtattacttggccaatctataaaggggtgtatgcaggtatatttataggaatccaaaatttgttagcttggaaatatgcaaatggctgctggatttttaaaagccattgaatcgacgtatgtttactgtatgattaatgttattagaactattaattactcaagggctctcagggggccacttattaactttcggtactatctgggtaaactacatatgcaaaaggaagaatacattgaagtgagttgatattgtaataagatttagtctgaggaacacctgtcatgggctttttcaaattgccttaaagataacgttaagatgagaaggtatgctttatttctactaggaaatcaacttatgttcataggcacattctcgagtgcttgattgttgttaggctggggcttggcaagatgcctccagaatatctgctcgaaaaatacaagtaggtcctgagttaataattgccttcagtcttacccactactctgagattgttaagtcgattgttctcggagatgtggaacgtttcaacaatacactcgtatgaattaataaagttaacattgttcaggacaattactttgaagatttcataaaggaaggaacaattttgtgtgtagaacagctcaaattcttggcatatagaaccctgattaggaaatcgtaagcatttaatccttaaggattttacgctctctttttaggaaagaatggtggaacacgtatgttccttcagggaagaataacatgcttcctgttggagttctaacggcaactgcaggttgtcaggttcccgagatgaccgacctcgaggtatcttatttaccgtatgtgaattattacctttagatgctatgcatttgtggaaatttgattaaaaggggctatatgaaaggatatatttcatgggagagactcacgatcgtctttagtacagttcagccttttccgcaaattagtacagtctaacataagtaaaatacattttaatctggtataacaacatgggtagaatatttatatatatgtgtatgaatcgataataaatttatagctacatcagtaataagcaggttaagattgtatcctgtaactctctagtagttccaagattttatttatcttgtcatcgggaattctgcataaagagggaattagagatttagcctcgtcagcagatttggggagtaaattgaccagacttgccatttcaaactcgtgtagaagcccatcacgctcaatcgtgctgcaaatttatgtaaataattagcaagaacaaacgttctgatgtcgacgatggcgttacgacactttaaaatagcaaaccgactagcatattcatgggatgttttaataaatctaaaaataaattgagaatagtgaaaacgtactgtacagctgtatcgttcctgttgtgatgaagtctgagctgatcgccgagaattaagtgaagctcacaaaggtttaaacacttagaatttttaaattcagggtccaaatcaaatttggtagggtcaaaattataagattccatgtttcggaagataatgtattaaaaataaaggaaactgtgaaattactgaacaaaatactataaactttaaaaaaatattatatttaaaagtggttaaaaatatatatataaaaattacataattaactgcgattggttgtaaataacatgaatataatcattgtaatataacaaatatgtatggatttggtcatattttactttatatatacatggggactcaaaggtaatcattgcttcatactatcatttattttaattattcatattttgttaatacaccaaaatatttaaaatgtcgtcttcaaatgaaaataatcactctggtggagataataccaacaacacatcaacaacaaacattttcggatccagtaccaagtcatcaataagttctctctttggagcttctactgacagtaatcaacaggataaaacagaacaacattcagagttaaatcagccttccaccacttcagatggcgcggtttcttcttcaacgtcacaaaagtttgaacacagagataattcggctgaaggagcctatgatttgtttggaactatgggtacaacaaaaaccacagtctttgggacaaaagagtcagaaaccttgaatgatttatcaggctttggagaaacaaacgccgctggcgtatcaccaccaaaagatgccgttgatgatgaaacatcatttgtttcaggtgatcaaactaataaagatgaaagtggtaaacctttaggtgtgtttggaaaatctgatggatttggagtttcaacatttgacgccgccaaaacaagtaatttgttcgcagatactcactttacaagagcctccgaattattgatgcaatcacagcataaagaaccgccagtgctgcatacacacatagaaaaacccaatgaagcacagcaccttgacttgagtaagttgactgagagtgattttggagaaggctacgattcaaatttgtactcagtagaagatagagatgatgaaaagttaaataaacagaaggaacaactatacggagaaagtaaattaaaggccgaagattcatctctattttctaagcctaaagaacctgaaacctcaagtttatttgcaacaccagaccctatgaaaacaaccacggaactatttgggccacctgataaggcattaaagtcgtttgaaacctttgggtcaggtgaaaagtccgcgacaagtctatttggacaaactgaaccaaagactgtaacattaggttcagttacagctcctacatttaatcttgtggagactgatcagacccacaaggttacagagtctagcctgtcatcaaagactgagagtttaaccacgagcttgactgagccaggtgactcaaaaccatcattgtttgggtcgacaaaatcaaacttatttggtgatttatccaaacccgcaacatttggaactgatgataataaattgttagctccgtcctctggtaccagtttgtttggttcaacagataacaaatcaactaatttgtttggaagtaccaccactacaaacttatttggtactccagaccaatctagtacgacaactagtttatttggtagcgcggatacaagtaaggctggcggtttatttggcagtactacaactagtactgggttgtttggagctcaggataaggctgctgatactactactaaaactggtactacagacttattcggatctgcccagaaaacagataatttatttggatcaacgacaactactactggaggattatttggcagtacagatacaagtaaaactggcggcctttttggtagtaccactcctgccacgaccaacctatttgccacaacagatgctactaccaccgctaatctatttggtactacagataaaacaagtactactacaactaacttgtttgcaacttctcagccatcaactaccggaggtttatttggatcaacagataccacgaataagactggtggtctatttggaagtactgatacaactactactactggtggactgtttgcttccactacagcacctgcgacaactgggttgtttgctacaaatgataaacctgccactactacaggaggcctgtttggagctacagaaagcacaacttcagggcctttatttggctcaactgatacaggttcatctcctcctaaggatctttttgggaaaaccgataaaccaacaactggaggtttatttggggcacctgatacttctgggcctctaatgggtcaggctgacactggatcaaaaacgggacttttcgcaactgatgcagggaaagctccactttttgggacagattcaggtaaaacaggggatttactaggtcaaactgattcgttgaaacccaaagaaggtatgtctaatgttaatgatatgtttatttagttgcaccaaaggttacatttacaatgccatcaactgatacagcaggtattataaataatagataattattaatttagagcctacaaaaacaacttcaacattgggagtaactcagactccatacgctggaacgcaggatacaactaaattagacgtagactttagcgttactgaacaacacacgatcgcagaattattagatagttgggaaaagagagtagcgaagaaggttgagtcattcaaccttttctcagataaagtcgctacaatagataggcaaatagtccagcagtgtaataatattaatagcctcttaacaatgcacaaagagctattggaaaaacataaaaaaatggaagcctcaattaagacaatggaagaggaacagaagatggcactctcagtgttagataacatggaaagagtactgaaagggaaacttgagacactgaataatagaagtaacggatataacatggtacaagcaataacaaggaacctacaggaactatcagatcagttatcaacgaccacaaaagtagcagaggatacagcagaggcatgtcagccagagccgctctacacaatcgcaaaagtgctctcattccatcaagtgagtcttatagacctcgaaaagcagtgtgatgagatagaccgaagaattaaggcactaaacccgagtttaacattataaacaagtggaattttaaaattaaagtttaacaaacatttgttatttataattttgtgtaattttaaatttttattcattacttcggtttcgtaaagttatttaatattaatttagaatttaatgattttatgtttgatgtgttgtttttcttgttaaatactgatgaagattccacaccacacaaaagtggataatttttaatattatgtaaattacaagataaacagattgtgtattcataaatatttatttttgtagagtctaattcagtttcagataatctgtattttataccctttttaaagaattgttggataaggtttaaataacagttattcttggattcccgaatccattccaatataacgcagttgataatatgatttactataatgcctttaagtaaaacattctggtttcccaaaggatcgatactaaacctctcgagatctatttcatacagttcaagttgtatttttagaaataaaggatataatttcgtatatctacagccacaaaatactgagttagggaaattgctatggaattctcagttttcagtgcaaaatgtattattaagggcatattcaagtaagggaggaggtaagggttcaaaaactcaggaaaatgaggatgatttaacttgtaaggaggatgaaggagaagaagttcaagaaaaggataaactactagactatgacgacacaaaggagattgtaaagaagccatccacaattatttacgatgttttaaacgcaccaaagcctaaaaataagtacggaaggcaagcacaaacgggtaaaattagaaggaaaccaatacctctttacgttccagacaacagcacaacagataatagtccacaagaaaaaccatatataccaactcgactaactccttctcaaacaagcttattcaaggaggaagatgacgatagcaaggataaaggtgatagtgagaaaccaccaaaggttgagaaaactgatggtggagatcactcagatcatttaatatctgcccagttcacactgccgattatccacttttcaaattccaagagagtgcacgcacttccagcactagcgctttttagaaagcctgcatttccaggcttctatcaagtactacaagttcaggaccaggctgtgataaagtgtttatctaacgtaaaacagaactcgggtcatgattatgttggcggttttcttactaaaacagaacgaacgaatgatgttagtaactcaaataaccttccaatgctcagagatgacgcaggggcagtgtcatcctgtgatgagatgcacgtgtacggaacactgcttcaaatcataacgataacaccgaacctgagttttcagggaggccaggtgatattgatgccgcataagaggattaaaatgactggaattcacgcagaaccttcagacgtacacccactgtacagagtggcagttgaatacgtggaagacacgccgaagcattttgaagactcatcagtgacaaaagcacttcatctagagatcatagcaacagtgaaggagttaataaagacgtctcacttctacaaggagcatttcgaccagataatcaggttctacaacctggattacccgacgagactggcggatttgatagctggaatctcactggctaaaagagaccagctccaaaacatacttgctgaacttaacatagacaagagacttacaatggttctagagattgcgaaaaacgaccttgagtttgcacgtgttcagaacgaagtgaacactcagttggaggagaaactatcaaaggaccagcgcaagtacattttgacggaacaaatgaagatgattaagaaggaactggggatggacgcagatgacaagtccaacgtgattgaccagtttgagagcgagtttgaaagagtcaagatgcacatgtcagatgaggcgatatcttcatttaacagtggaatttcaagacttaaacacttagagtcctcaagcgcagagtttggagtttggaggtcatatctggagtggttagtaggtcttccctggggaaaaactacagaggagtctaaggatattcatagggctaaggagatattggattcacaccactttggactaaatgatgtgaaaacaagacttttggagttcatggcaacaacgatcctcaacggacaaactagtgggaagataatatgcctaataggaccccctggagtaggaaaaacatcaattgcaatggcgatggcggagtccctaaacaggaagttgtataggttctcactaggaggattgtttgatatcgcagagataaaaggccatcgccgtacatacgttggatcacttccaggcaagtttgtacaagcactaaagtacacgaatacacttaacccgctaattatcctggatgaaattgacaagttgggcagagataccagaggagatcctgcatcagcacttcttgaggctctagacccatcacagaacatgaacttccgtgacttttacctggatataccggtagatctatcccaagtcctgtttgtatgcacagcaaactcaagtgacaccataccagctccgctgttggaccgaatggagttgataacaatacctggatacctgccagaggagaagttactgatatcaaagaactttctaatcccgcagagtatgaagaacacaggactcacgcccaaagtcattgacattcaggatagtgcaattgagtgcataattaagcagtactctagggaggctggagtgaggaacctgctgaagtgcattgaaaaaatacaccgtaaagtcgcactagaccttgtaatgaaacacactaaaagcacaagttcacaaactactgataccagtaacgctgaatctacagaagctagtgaaacatatagtgaagccaatagtgaagcaaatagtgaagccaatagtgaagcaaataatgtagaaaaattaaatccagccgaagttgaggatgttaagagtgctttggagagtatatcggaatgtacagtagttagatctgaggatgttcagtcgtatttaggagttccaatatacacaaaggagacacttcatccctatccactaccatatggagtggtgctaggtctggcatggacaaatgcaggaggagcaacaatgtacgttgaggctcatggacaaatgcttgacaagaaagggaacatgatagaacccgacagaactcctgtaaaagagttatcatcaactgatactacaccttccagtgatagtactggtgttgatgcgctaaagggtggaagcctcaaggttacaggtcacctgggaactgtaatgactgaaagttcacaaatagcactcacatactgtaaaacatttatcaggaaacatcagcccaataacatattcctagatgaggccaacatacacattcatgtgccggaaggagcaacgcccaaggatggtccaagtggtgggataacaatggcctcagcattgatttccatagcagctaaaaagagaattaaaccttcaattgcaatgactggagagttaacgatatcagggaaggttttgagagtgggtggaattaaggagaagctcattgccgccatcagagaggatattagcactgtgataatgccagttgggaataagccagacttcgaggaacttgaccctagcatcaaggataaactgtccatcattttcgtagatacgtttgacgatgtttaccatcacgcctttgagtaattttatatactaattatattatacatggtagttatttagtaaatttgtggtatactagtaatatgtatatacatgggtttattaatattactgttgagatatttgtatatatattaagtaatgtaaataattaaaaaacattcaaattattaaataaagagattagttgggcatcggaggcattgtcgcaggaacattttgaggttgaagttgagctggggcactgccaacaaggcctcgcataggagcttgaagtgcaacacctccggcaggcatttgcggcataccaggctgcatcattcctggaaccataagaggtgctccacggccggcgggagtagcctttccaggtcccatagggtatcccaactgaggtacattaactggagatttagcagtaaacgaaacgatattctcacccctaagtaaaacaaagcccagagtacgcttgacttcctaaattaattaattaatcatttattaataaattaattattgatttagtaagttaaataattatttatttaataagttaactgattaattattaatggataaaaggacgtacggttctgtttttatccttccctaaagtcatgcgaaactcttcacaatctgataaaactagattcatatacttatcgtaagcgacaagtgttccaacaaacttcctgttatccttcagagtaactctgacgttatattgcaaccagtgttgcatacgagtattcttcccaggcatatttatatatttacactattatattataattttcataagagaatcctagtcttaattgcgattttagaaataagatattaaaatatctgacaaaagagtatgaggatcctccaacaaaatggtacaaaattaaatatataatactacaaagaggaaagaattatattttatacttaaaagttaataaacatgatatactggaaataattaaaaaattatataatggggttgaggaaggattaaaatggatttaatggatttattttcgactattagtctcagcggcattaggaataaattacatttttatttcatattttgatctcaaatatattcttgattagatagtgtgtattgtcctttattattaacacatacttctatgtgtattctttctccttatctagttattcatctgactgtttttctcctcacggcactgaacagtccaagtgttcttctaggtttcatttctaagtgttgttatttaggtttttggttttttgacttaccgctttttcgcttttccttggtatcctccaaatccttattttcctgaaaattttatttacactgtatacattaccttgtttcttaatctatcaaaaaggctttttcttggtttagctttcctggaattctcgtcattttcattgattttgggacctatttacatagttgaatttgtattaaacctaccctcattaagccatccaattgttccacccaagagttctatgtattcggtcttttcacaataaattgcaataactgcgtctatacggtcctccataataaccttcaaataagtgtgtttctttctcttatttcttatgatttcgcagtataagtcagtcgcaaatatgtcaaaaatattttgatctaatttaaacaacaatttgtcatcatcgtaatcgaaaaagattttgcaatgagaagatgttgaaggtttatcggctaaactttaatctaataatctttaaacttactgttaactatgtaagctgttgcatcaaacccgttaactaatatctcatagcgattgttctttagaggccttactacatttcttctaaagtcaaatgtgtcattttcgtattctagttggccttggtctgcatcatttgcctcagtttcaatatacctcgattctgtaataaactcatcttgagtgtcaaatctatcagtaaacatgtggttaagtgaaatagttgagtcggcctttttaaattccgattgattggtaagcatatgtcctagagaaacggttgaatcctctttctcgtatgggacgctttgattttcattatcttcaaaatcagtcttaccagtcaacatgtgctttatagagatatttgaatcagccttttcatatgggacagcaatgccttcattatctgcaagttcagatttgttagtaaacatatgccctaatgaaattgttgaatccgccttttcatatgggatagtcgtgctttcaatgtcttcaaattcagatttagtagtgaacatgtgctttagagagatatttgaatcagccttttcatatggtccgatcttgcttacagtattttcaaattcagatttagtggtaaacatatgtccaagtgaaatagttgaatcatacttgttaaatgaaccctgtttacttagttgatcttgaaaatcagatttgttagtgaacatatgtataagtgaaatagttgagtccttcttttcaaatgaccttatcttggttacagtatcgtcaaattcagatttgctggtgaacatatgccctaaagaaacagttgaatcgcccttttgtaaaacatctataaattccttggaaagatctacttctatgtcgtttttagaggtatcagaaccttgattttcagataagtttagtgaaatttcagaaggtgtttttataatattactaacgtaaaggtcggagcaagaacttttggttgaaagaacgtttctactattatataattcatttaaatgataatcaccaatagacgaagatttctcttcattatataaagatgtttcattctcagggtagccaattttatattcagtaagtaagtcactggtcccttcaaactttccagaatcttgtggctcatctaattcgtaattaccactgggacttttagactggatgtaactgttacgtttaaatgattctgaaaataactgagctccagactcagattcctcaggagtttcatcaatagagagaattggtttctcaagaatggactttgcagtttctacacttgtggtgtatctagataatgctcgagaagtgtttttggaacttagagtagaacataatctactcaaatccattttaaatgatttaatggatcttattgtgaagggcgaatctacagctttatatatttcttcatcagttattagcctgttttgtaaaaaactaggcgtaatcctagtatatatacttgccacctctgaactaggaccatcacgattactcaaaatgatgctatctgaagattccgttctcctaggtgtactagttggtgagaattcctcctcgggaatagttgatttgacagtattactgtctataacatcagttgttgatgactcattagggattccactgagagcaagttgttgtttgagttccatgtcgtaaatttcactaatgatacttctcctgtctcgataagatctattaataacatgttcagcatttctctgttcactagttttaacagcatttttgtatatgtagctgttttcatgcatatcccttaagatagggggcatgtacccagcattgtgtttaataggtttttcatcactgaaaatgcctttacctttcaatacgttataagagtattttggctttgatttttcaatatcctgttccttattaggatcatatttaggccagttctttgttacttcatcccaaaatattgaagggcctgaatattacatgtagttatacataatatatttatgcgtatatattatatagtgaaacataccacagtattcaacagtatttgttttcttctcttttggtttatcctctggctttttaaattcaaatatcgagtccagcaagttgagaggtttattaggaactaaataaatattattattagtttataagtaccgaaatctatgtgatgctccacgaaatcacccacatcatcagaggattgctcataattaactggtgaatcattgtaaattggagtgtttttagaagttaatgaaggtttaggttttatatgatgaggaataggtgttgatctataacaaacaatgcctcgatcataaaaaagtacggaatttcttcgtacaaaatgcattggaacgtgataaaatagacataaattgaaaataaatttaactaattacaacaacgaaactttaaaaataagattttaagagttcataatgtttaatataattcattatttaaaaaaataaaaagagcgacaaatattaaattataataaaatatatacataaataatataagaatccaatgtttcaaatggttataataatagatcagagtgcacttggactattaaagtgatcggatcaaataattaaatccatgtatatactgagttttttaaaataacaaatgtttaattttccacatcttatttgaaagataatgtcatattttataattaaatattaagatgaaatttaaatttctccaataaaagaaaatgtgaatgaataatgaagcagaattattgttatttacccacgaaactaacattagaaagataaaattaattatttatatagaatcattaatgattacataaattaattatttaatgtaaattgtaaaatagattttgataagtaatttttaaattctatgggttctgatgtagccgttactgattttcctccttccacatttaaactagaaaatttatctcagttggaggaggaatacttagataaaattattaaaaaggctcttccgtctaattataactttgaagttaaaaaatgtgtgtacagaataagacggaaccggtattcttcagtatgccttcagatgcctgaagggctattaaactggtctgttgaaataagtgaaatcttattatttttctgcaactcattgaaagaggtattcttttaaatattattaatatttatacaaattgttttaggttgttataatgggtgatgtaacttacggagcctgctgtatagatgattacactgcaacctctctcggttgcgaattacttattcattatgggcattcatgcttaataccagtaactgaggtcacagttaattgtttgtatgtttttgttgaaatatcattttccgcccaaaaactttcatcgtcaattgagtcttgttttggtccaaatgaacacattttaatgatgggcacaattcaatactcaaatgttatccgtgagtcagcctcaataatgaacaacaataaacattttaaatatctagttgatgttccccaagtatcaccacttctgcccggggaagttttaggctgtacttcaccagtaattgaactaaagccacgaattaaacctggttttgaagaatcttctgatgtttccagcagtataatttttgttgctgatggtagatttcaccttgagagcactcttatccagaatccaggcattaatctttatcgcttcgacccgtttaataaggtatgttgttactgctagagtaaacagtattcagattttcactgaggaaacttatgatttggatgctctgcatagagttcgttacaactcgattttaacagctaggaattctaaacgcgttggtattgtgctcagtacccttggcagacagggtaatatcaacatcatgaacaacatctgtgatcttttgttatctaagaatattaagcatttcaagatattggtgtctgaaatcacaactgatcatttgaaaacactcgacttcgactgtttcatccaggtaataattactaaaaattgatttatcgcatttgtttgtagattggttgccctagactaagcatagattggggggcttcatttcctaagccactgttaaatccatatgaagcatatgttgcattcaagaatattgagtataaatcagtttatcccatggactactactccaagtgtggtggagagtggactaacagctcagccagttagtttttacaatctctataatgtatagatgccagttgttgtaagaacccaagtgtcaaggaatccattaaacagcgacttttacagagaacgctcatgtcgaaacacttatcatactctaaatgaatggaaacacctttaataactgtaaaatagaccactgtaaaatatatcgtatcaatttaatataccaaactcagttaatattataatatacaactgcgttgtatatacctatgtgtatggttgtgtgtattaaaatggagaaaattagttattagacttagttttatttaatgcgaaatgagaaattcttctataaaaaggcaaatcacaatgcgttttgcccattacaatgtcataaatgcgacaagtttccatatccaacagcgactcgaactcgttgtggtgtgactcaagcacgtctggattatccctaataaaatctgataaaataatatccagttccttcattcccgtgtttttagctctgaaaattagtttcttactccttagatctgatgaggtaaagttcctgttcgataaatgggtggtgtcagtaaatccacacctagtccaataccttgtgggaatcgaacttttaatgaacttgaactttgaaaacatcttaaagcgttaaaatatacaaataacctttctctataactagcaaatggtacacacaatcaactaaaactgtaaactgaatatcagctagggctggtaagagacgaaatatcaaaatcttctggaatttcaatccagtagttatgagatgtgttatatagggatatatatgtatcatatgacatgttagagatatcaataggaaatattaggagagaaggattaaactcagaagccatatcaagtgagtagacgttggcgcccttgagcttcaaactcttttgaaccgtgggaaataattcaactaaataaatatttgtgtatgaattaaacttacgttggttctttgagtttatgaatttaggtgagacttcagagtttggtttcactggaacaggtaggagaggtttggggaaccctttaaaggtgtccaacgtccgttgaaaccttttttcaaatactctacacaggtcataccctgtgtttttatcaagttcatgcccatctttcaaattaacaagcggcacgtttgtgaaatactttgaaatgtggatataatcaggtggattcaggtccagcaaccttacccaggaaatgtcaaacagcggaccatcaaacttaacgctggaaaatttactctttgactttgagtattcaccaggtcttgacttcatcaaggcgtatcccatcagcgtgttcgtggcgaacaacgggaatatgagaataacgttgaatccgttatcatagtgtttcatcaatgttctttcaacggatgatcttgtgccccaaacatcatactctatggcagttgcagtggattcatgtgacaatccttttaaaatgaaatacacgttattcttactagaatctagaataatttttaaaatttaagtaaacttacaaatctttttggccgtagaatgcgatgcatttttataaaaatatttcagtgtatccatttaaattaatggaacctatttcaagtgttaagatattgtacattgagcatatttattaaaaatcagatactgagtgtgaatgttaaaataaaacatatgaagagtaaaattacaagttaaaaatagttagtccgaatataaaactaatttatcatgaagtttaaaatgattgagatatacataggatttggagtttaaaataatatgaaaaccccttctgaaccagatggggtaagaaaaccaacttcttgattataaatgtacaattaaaaagaagattgtataatgaacacctttgctgtttaattctaagaaccctttaaggaatttggtatgtttgaataaacacatccctattttaataagttattacatttgcatccttaacagtattggagattttttgaaactttccaaatgttccacttaaaaagatataataagacggaagataacaaccccgtccttgttggtaaggagaaggaactctacgaatctaaaaactggccgaaatcattttctagtcccgtcgacatcaccagggttaaaatcgacgcctttaagccatggattacaaagcgtgtatccgatttgatgggaattgaggacgacattgtcatcgattactgtatgagccagttgaaggatcttggcgaatctgacgctaagagaaacacccaacttgcaggcatcttaaaaccacacatatccctatatatccctatatatacctacatatccctatatatccctatatatccctatatatacctacatatccctatatatacctacatatccctatatatctttacacatccctatatatacctagatatccctatatatctttacacatccataaaaatattctaataatcctatttagaggatggaggatcagtttttaatgagaaaccacgactagatcctaaaaggctccagattagtctgactggtttcatggagaagaaagctggaattttcgtgagggagctctgggaacttctactctcagcacagtctaatcctgatggaatccctcaggcatttattgacggtgagaacagagagaatgagcctgtaaaggaagaacctgttaatcatgaaaagagggaaacttcaagagactcttcgcactcttcatcacttaagagtactaagaaccacgacgatcatagatatagtgattactcagaaaaacccaaaagagaacctgaaactgacaatgccagggagcgggaagatagagcacagagctacagacgacatgactttaaaagagaatatagagaccgagatcatagaagagaagattcatacaaacatcgcagtgagagaagagagaggcgacgttataaatctagttccagatctaaatcgccagttagggatatagacagttcagaatccgtactcagatcacggtcgagatcgagagacgtaagatctcggaaacatagacgtaaatcaccttcgagctcatatgaggagaaacacaagcgtcgcaggaggagaaggtcggtttcctcagattcatggtcaccaactcgagatcgtcgtagacaaagagaacgagcccggcgtaatcgctctaggagccatagcaggcaacgatacaccagaaaacgagattactcctccagctcatcgagccttgatccaggtacctgacctgcaatagttaattaatttttagaacgagttagggaaatgacaaggaagatacgaacgaggaccagtaggtgaatttatgtataaatctaagggacttagactcaacttcagtttttaatttagtgcacatctatggctatttacatttctatccatatgtacttgtgcctatgtaataaagatttattgtacaagattataaagtgaatttcgacctaacgtcctcatcgatcttcactatttgctgaactatatcatcagactcgttcctgaataattatttgggtaggtcgcttacattttcctaatctgagctggggagtattgcctgacatgtccgaagatcctgaggtctgaaataaccttatctagagggtagtaaaacggtgatttgaaaatgttaaaggactcaattggcggtagaattgcgtgcatatcaacgtgtgagttagtgttagggtaattgaagccgaaaattgcactcttgagaacaaaatcagtatcagatttgttagacatctgagacttaaaatggtcagaaaacttggtatttggtactaaatgaacgattttacctgttatgatgtccctgaaaatcccaatacacttctcgttcattttatttaagagtggtacgtgtgactttctgaagttctttatgtcgtaaaaggtaccatttgggaaagcagaaaggtgtatgaatgaacatggacttctgttaatcattacagtaaagtcaaagcacctatacagagtagaatcctgtcggctttgccacttccgagagttgctaacttcacatacatggtcaaggttcctaagccttatatcactgtcagttagaccatttgagcaactgatgcagcttatggaggatagactattgagagacttgcaatttccacatttctttacgtaaaatctattagtgtaaaatcggctatgagttgaggagtggtgtagaaaacgtatacctaaataacggacacaactatgatgcaatttattcatttcgttttgttgaaaacgactgaggaaattggaatatctgttactgaaactttaattgatgatgtaatgtccgtatccagaaataacgttaccttaaacactccaaatttagtaatcagacccgattctgtgtgtatttttacgtcctgttccctcaacatgtcaagtgggccaagaattttaatagatctcagtctatgtattatatgtattggtctcaagggcgcgttaagttcatctggattcttactcgatgaagggatctggaattcaagtacgagattccttcctattttatccttgagttggagtgccgaggttctcctaatattcgctagagcctctttgtagtcacggtcaagtgctattcccactagttcagatctcgttgtgtatcttgcgaatccaaatggaaccagataattaaaagcgaaactgcgatttacatggaccacttcacctaaacagatttatttatttatttatgaatggttgtgtatctaagattttgtatttacgaaccttttttacccacgttaggcgtatccttctctagagttacttggacatatttgtatctatgggcgaataattttgagaatccagggtgtgaagattcctctggattctctccccttataaaatcctcctcttcaggagggctgtttctttcagaaaacgccgaatttgtaccaccgtagttgcgatataatagtgaagacgatatgtgatttctataattggaatttctaacaaaagagttagtagcaacagccactgcgataaggaagagagtgaaatttcctatgatgaacttgacaaagtacaatatggataaaacataacaaaataaatatatttacataaggaatccaggcaaataatcatagatattggaattgaaattatcaactaagccctacacacagtcgacacaataccactaataacaataaaataaatcgatataataatttatttcaggttatcatacttcaaatttatagtttttgtttaaaaccacgtgcgatgtttaaaatgcatttgacttcccgtaaacgtcgacatcgtttctaactgcttcaaaatatatacacttgtactgcgttttcatcatactcagggagttagatgtatagttggcatcctttatttcaactatctcaatggtaaaccagtttgagataattttctcaatttcgttccaggctaactcgatggaattatgagttaaatcagcgtaatggtacagcagaggcccaatgtttgcccataatcctcccttttttataatcttggcaattgtacgaatgtaagaaatgatgttcttggctgtgtccaaaaagaagcaggttagaatcccgtcgaaatattcataaaagtcgtcgtaggcctctgtaaactcaccggcacaaatggagaaattatgtgactcaaaattaaaacttgaaggtgaaacgtctggaatataaatttccttcaaatggtcatcgtttgatattctgtttcattttcgcttatatcagaactaacctgttactggtatcaagacaataagggaagattttgaaggttctaggcttaattgaatgattaataataaagtttgaccctaaacatcatgatgtggaactattaataccaatgagcatgaaatatgaaaattcatttccttggcttgagtaaccaagtttcaaaacctcaaatggaagtcgaccaagtccacaaccagggcaaagaattctgacaatttttattaataaattatattaaaattttaaattcaaattacaatggtggatttttaggatctttaattggtaatttacgctttagtgcatccagaagtggagtgaaacattgattacgttcatgttcaccttcatccgaccagtccctgacaaactgccttaaagtggttcttacctaataagttcattaagttaaattaataaaattctggataaaggatacccaattgccattcctatgtaaaataacaggatcactggttggattgatctcagaatcctcaaggtcctcaggggcgttacagaatgatgtatttttaacaatcagacgaagctccttaatgacatcttcatcggtgtatttgttctcattctcaaggtataacttgtccagtttgccctcataagtgtcgaaattaataattccagaaaccatcgaaatgatgaagttttgattagtaataatggcctttagcatctttatcgtcttggctgcaggtgattctatgaggagctttttatcatcctcggttagaaggttgtatgacctatatacccgctcaacttcaacagacccatccctcttgtatgacataaaggagtataaaatgttaataaagtgctgaagttcctctcgttcatgtttactgagattattcatgttagtatgcttatgatacgtataagttaattttgttaatataatttacattcatcttagaatgtgtaacacactggcattggtatacgtttactaaaaaaataaaacgaataataaaaacaaaaactagccaaatttgaacaatttaaaacaattataacacgagataatcatcatgtataaaaaattatgtttgttatccttatttctacgtttattgacccaagatgacacaataacgaagatattatttagttattatgctgaatgaagtttaaatccgattaattgtaaagtatttgttttttatatacgatttttatttaagtcgttcaaatggttaggattattgaagggttgcacgttggaagttttaacacagttaataagttattcttaccagcgaaatctgataaatatcaagaattgtataaacaaaataatgtagactcggattccgtacaaaatgttagtactgccgttgtttcagtttgccacgatgtgccatattggtgttcactaagaagttcaaaagggaataaaaaattcgatgtaaaagatccaaagttatcagatctgtataatagcaatttctcaaattcatacttaaatttgcattttgaccttgttttaccatcaaaagatgacgattctgaagtcgcctttgaggatggattcatgtttgtactacattcaattatctttgccgatgatcaacctgaggaaagattttacaaatcatttcaattttcatatgagtatgtttaaaactaatttaaaagcttttagcttatttgaatacattttatcgctggaaaaaggattagttttcgtccactggtttgttactccattatttataatattaatttgttcatttttagtcaactgggactgtgtagaagcacttctttaatttgttcatacttgatgaggaagtggaacaagcccttcctggaagttaagaggtacatgaagagtgttcatccaaagactgcaattagtcactacttcgaataccagatgattttgtattataaaaatgggttcaaaatagacgacgagagtgtattctatcagtattaccttaaaactctagatagttatcttaagaacagacataacttgaacttggaaagtgagaaagaccctcaatttgtgtactcctgtaaaacctgcaggacaactttgttttctgacaccaacatcattaagcatgaagagaatggaaaatcaaggaaaaattcagaatgtaacagtattttcattgaaccgatgatgtggatgaaggacctagagttacagagtggcaagatgctctgcagtaacgacaactgcaatgcaaagttgggctcattctcctggcatggacgaaattgttcctgcggtcaccttcaggttcctgctttccaagtccaattgtcaaaagttgacaggtttgactacttggaaactgacagagtgccaccaaaggatgacaatttgcaagttaaatgactaatttcataaacatatatcaatttaattatggctttacattatcaaatactcttaattatctaaatcagcagaagtttcttcgataaaatcacaacacattgttaatacaagattagaataacctaattagttgatataacttaaaataaatgattttacaagtatggattgataaagttggtaaatgtaatcccataaaaataaccaaggcatatgttgtgttgtgataatatattaaaaaaatttaagaataggaagaagtaacgatattttgactaaaaatcatgaaattagtcaaatagtgagaatcccatatcatcttcctcttcctcaggctcaggctccttcttagattcctcttgtttttctaaagtttaagttaataataattttaaatacctgaagatcccgatgcctgaactgtagaagctactgcaacacctcctccagctggtaatgtctgaagcttactcaaaccagcacttatggtctaaaataaattattttttaaatgtaatttacctcatggacggatttccctgagacagctgagaaaaaggcattcaaagcatcctcgtccacttccgatccaacggagttaagaacatctctgacgtcatctttggatgggctgtcgttaccacaagtaacggctaaaaggtaacttgcaacgtatttgagagacatttataagacttcagaggtaatttacctataatgtaaattatattttgtaaaaaaataatattaaaaaatatagaatctttataacaatataatatagacagattaaaccacaaatactaagtattattttattaaataaataaagacttacaaattgattgtagattcaaatcaaaacggtacgtcgatctataaattcaatataaatctgatattttaagttcatatagctggggctttaaagcgttggtggggagataaatgtgccgatatattccattaaagcttaatctaagtcacatttataaattttaaacaaaaacgtcagacagatgcaaattacaatttgtttctaaaattctgacttattatatgaagtttttattggattattttattaataatttttaacctattctatattttgtaataaagatggaaaataatagcttttctggtgttaatattgatttgaattgttttccaaacagttttctggataattttgagaaggacaacataccttttagactgaatgaagcacatccaatccacgatattgattttaatcatttgaaaaaaacaacgattgatgaaaacaacagaatcgcaaaatgttttggttcacagcaggccttaaagaattctattgagagaaacatgtgctcaaaatcaactaggctccctggaatcaccagcagtatgctttcactggaaattttaatggacaaactggatactttagaatcgtatgattatatgaatacagaaaaaccaacaaatgactttggattaggtggaatccactcccatatagaagataaattgaacatataaacttctaatctactaaattataaatatatttaataatatacatatatattcattttatgtgattatgataaatttaaaaactcccgatatttatgaaaaatattatacaatccttggaaaggcgaacaataaagcagagttgaaggcatgtgtgaacttctcgagattattcttataggaaagatcatccgaatagtccaaatcatttttattttcctaaaacagatttaaataaattaaaaattacctttgaaccgagaaaatctgtagtttcatcatctccagtatgcttaaatatacaacagccttttaatctgtcagtacaaaaagcgtttttctcaacagatttacacggaggcatccttgaatatacaagttgatgcagaaaatcacagaattcacccttcatacacatcccttttagccaatggcgacaaactactgagtgctttccactactacgctcaatatcaaccctttcaaaaccttttaacctcagcaatgctaccttctcactgtcccttttaaggacgtcaagtgctaatgttataagaggatcatctttctcatttttatgatcatcctgtgtactttttaaatgattattctgggtatcaatggcttcatataataaggttgaaaaatccataacaaacaaaattaaaatatcattacattttaaattagttatacatatttataaaacaaattaaagtaacaaaaaataataatagaagaaattagaacaacagataccctctattgagaaatatatacacacaaattgttaatatttaatcgagatgtagtttattataaatggaaacattgtatttatgaattttagcaggattcttaacacatatttgttttgtaggatgagcaagaggcttattaccgacttttttgagaccaaaactgatcttccaaataaaaaaccactgcacaatccagtttctactgaattaccaaataaaactcctgttgttgtaactacttcctccgattcttcaaagaatgaagatgagttttctgattctataaggaatatgcttggagatgaatggtatccacaaagctattaaataattatatttattaggtttgaagttcttgattctgagattaataagccctattttaagagtttgtggaacaaagttttgaatgaaaggagctctaaaaagatttatccacctgcacatttggtctttaatgcatttaaactaacaccgttagtccgtaatttttattctttgtaggctatcaaagattaaggttgttatagtaggacaagacccatatcatcaacccagacaagcaatggtattcattaactttatatttatttaatttcattttaactttatatttatttatttttagggtctttgtttttctgttcccaagggagtattacttcccccaagccttaaaaatattttatcggaaattggaactaagagttttcacggagacttaagttcttgggcctctcaaggcgtgtttctgctcaacagcatactcaccgtagttgacagtcagcccatgtcacataaatcctacgtaagtttgttttaaaaatattttttaagggatgggacaccttcacagacaaggtcataaacataataaacaataaacgggaaaacgttgtatttctactttggggtatatattctatatttaattatttactcttgttaggccgttctgctcaacagaaatgcgcaagcatatcatcgacaaaacacttcgttttaacttgcggtcatccatctccactttcaattaagcattttaaaggttttttaagcattaatttaattttctaggatgtgaccactttaataaatgcaacgcatacctgaagaaaactgaacaggaacctatagagtggactcttccacagtgattagtactgagtataatttgttaaaaatattagttcatattaaacattggaggttgaggcattgtttgaggaatgactggaactgtattctgcataggcagtggtggcattccaacgggaagagctcccatattaggttggggtagcagtggagggttaaccatgttctgcggtagtccaggcatcattactgggggcggatctataattaattaataaactaatattaaacatactcatgacggggtacatgggcatttgaggagggacgaatgtatttgctattggcatctgggcctgggcagctgccatgtgcttactgtaatcctttggcctctttgaagcaatcagtctctcggcagcacccccgtgacgttcacctaaataacgtaatttttaaatttaactacctttagtgtcctctttatatgcgtatgatacgtgtattggcttgttacacagaaactggccgttcatagtacgaagagcagcatcactagcctcaaaatcgtcaaatgaaactatggcgtaggtcttgcccgaggtttcagacctcaccatctaagaagaattatatacacactaattaccttggctgacaaaactcgcccaaatgctgagaaggtatcatggagtagtctttcatcaacctcgtcgtccaagttaccaacaaagagtttagctccaacctaacaataattgatttgaggaaaaatacctctcttatttccttatcttttgaagctttgttcagttttaacggtttgtggtataatttaacaaaattgaggatctttagggcatagtcagcgtcgacttcagtttcatattctacgaatccaaaacctataaaaagattttaaaattttaaaaaaaccttggtgttggccggtaactttatctcttggaacgttaatactcttaactcttcctgcttgcataaaaaattcccaaagaagttcctcatcggcttgtaaatcgagattacctgtccaaaatatgttttaaaatttttaagtaattatatctactaaatatatagataattatcgtagataatggtcaaatttagtacggaatctaacctatatataaagtagcctcttggttgcgattataaagtgaaagaatatctaaaactctggacgccatgttttatttaaaaatcatttttaaaataataaaaaattgaaacacataaaaacattattatgaacaaatcaaggtacttgtggtgtttagagaaggaacataataaatataaataatgaataaaattgtagtatgagattaatattttacatttgaaaacaacaatctgttttacttgttaatttacatatcctactttatcacaatatatacaatttactttacaaaactacattgttaatatttaatccaggaattgtttaacaaacacttatactacatttcgatatgttataatacactttatctactcatccttgaattactgcattttgctattgttaacactactggttcaactcctttttgaagcaattgtcgtagttataagacttaataatcaacatataatcgtcatttgaacgcttagttttccgattttttggtttttgggtttcacaattgttccccccctttgaatcattaatttcctaaatgtgttttgaacgactttgtaaacttacatgctttactgtggcttggcctaccatattttcagaagatttttctacaaatgaattagcttaaaataaatacacatctaataaatgtttaacaacattttattaaataattaacttgatctacgtttaaattgtctaaatacctgattgatcaatcgatctgaattcgcaatttttctgctttatggaataaaattttccgtgatcacacaatttggattcacaattcttatcaatcatgtcatgaatcatttcaatggtgctgtaattgctgtatttcaagattttggcctcgaatttggacaattttctattttttatcctagttcctacgtttctggctgttgtgatgacggggatggcgatgttgtttatggaagtcggcgtttcttttttcctccttttgacctgactgtctctgtagtatggcctggtgagataagcgcccggttgagtgtttcgagtcctcttcaaacttaagttttcgattatcagagggtcgtttttatcacataggtctgacaaataaggtcgagatgtaacctcgtaagtaaccttgcttttcctcttatccagctcgattaattggtcattgttcaattcttccaaaatagtgccgtcgtcctcattaatgtgtcggttgtactcgataactttgttcaagaacgaacgtgcgatgtgatagctcttgatgagcttgtcggtgtcgtcatatctgaagaggcaagtaacgatttcgtagtcattgtcatagtatttcaccttccacatccccttgttaaaatacaatcctctaattccactcaccggcctagccccaacttttgatagtcctacattgactctatcaatagtttttccaaaattagattttgtgatatctcctagggtttctagttcagaaaagtatgatttgattttgggatcatttatggattctagttgtttgttgattgcagaaacgctctcttccgtcgtttcggaggccattcttataagcgcaatgtgtaaaaaacgaacaaaattgtacaagttattaagatgtgaaaatttagtcacatgttacaaaaaaggaaggttttcaaaaggaatattcgggaattctgaggacataaaagtgatggaaaattttgataccataagtacataaattgcagctcaggtgtacaagttcctttaaattttaaaatggtggcaacagtaaattataaatattttaaagataatatatctataggataaagtggttataaacattaaaattaagaagatatggagattcgtgattcctcttacacaaaatactttacatagaaaaaatatgtatctggagtgtatatatctaagattaaacattattaaatgtatttataaaggaaaactgtgtttatggtcccaaaatgggtaatatttaataatttatagatgttgggattccagatcttcacgatgtccccttgttttcgaataaaacaccgtttttaggcacacatccatgctttttctttaattataataaaaattctatcttctactgcgttggtatttatcttttagtttttattcaacaaaaatagtcgtacgttctgattacaccactttccattttttcacattcttttttaatatcctgtataaaataataattaaatacgccattcaatttttattttccaattttttaatccacttaaatcataaattacgctttttaagtgagggcggctagctcaaatggtagagcgctcgcttggcatgcgagaggtacggggatcgatgccccggtcgtccacattaaatattttattttatttcacccctttgagtacaacttaatttatcaatatatttttcacttcttaggttagtatttaccgaacatatgtacatttagttagattaatcaattgatatttagaaattgaactcccaattattagaaaattattcaccataatgattcctggtcagtacgttgaaaatcctttccttggttaaatttatgctgattctttttttgctggttataaacaaacggtcttctctggagattcctgtcccccaaatctgaggtcctcatattttggagtgtgttgtcagcgctcccagtcatttgtgaaaagttctgtaggatcatatttgacctcagggttaaattttgagtcttctcaatgacttgctggtacaggttagggggtactgtcgagatttctacacagtttttttcgctatcaattttcgcctctaaagttcatattaatgaatttaacacttaccgacgtgagagtgtctaattatgtttacaatccacctttcagcgtccaatgatgtcatgttaacgttttgtgcaattatactaagggtatttatcaaaatttcaaactaactctaggtttattgacttgtgtatcctacagtaggtttcaaatataatgtgcctggagctttcctcaattgcgtccttgagcgggtttaggagcacgtcaacgtagcaggcctaattattagtgtgtgtaacattgtggtacctctttgatttcaacaatgtgtttttgggcagcctcaaaattgaagtcaacgaagagtgcacccaggagcgatgtgaacgtatcattatatttatgtttggtgtttgcaattacctgaaatactttagatttgaataacttacgttgcttattgtcttgaagtgatccttcctattcctgttcagaattgcgtacactgcgtagtacctcagcaagtgaggcgttaacaggttaacgactgccagattcctctcatctaggaagtattcctggagctgtggccattcaaacgactttgtgctcttgttgcttaggtggaacagggccaggtggtacttgaaaatgtaaaacagtgaccagtgcaacagccagcatctcttcaaaattaggtcctttttgtctcgactcatctcttctgagttcagaagttcagcaaacttaagaacgcaataaacgcctgatctaggagttctctggtcgataagtgtggtatccttatcattgtctgagtcctgttgcacgattaccattgaggacatttcttgcaattcttcgtggcttgatgggagaagtacgcttagcatattacagcttatgattccccaataacacttcattttattcctggttgaagagcctgaagaaaatattgtttataaagtttaccttctactgtgtattttgacactgagttgacgtagtaaattagtagtgacttgcagttctcgtaatcttctctgtcaaaatatgcttttgctaactttaaaatcaattcgtcgacgtcgtgtgggaagtcggtgctaacatttaactgtgatgagttggcccattgtatcaatgatggaacagtagttttttcgaaagttgaactgattctatggagttgttcctttttatacatggacaaaacgactttaaactgttctattttagataaagaatcggtttccaatttagagaactcttcatctgatagtttacgggactgcaattttttgtttagttcctctctaatagagctcaaatcatctgctgaatatatattctttgaactcaaccagtctaaaacatacaataccatcttaggctccaagtatggagagagcttagaagtgatgtcatatttatgacaatcaggaaaattagattctttcattttacaataaaaaacaaattataaaagaacaaaagaacaaaatttcattaaaataaaccaatagaagaaacaattaaaaagaatagtttattatgaaaatatgctaaattagaacacaggtgtcaaataataaaataaacaaattcataatttaaataaaaacaatatattgactagaattatctcttaagatgataattataaatttacaaaatggaatctaatcaaattaattaatctaatgtgatagtaatatatttccccattatattgaataaacagtgttataacacttatgtaacatcatattattttttatttttatattatacaacaataaaatacaataagaatatgtatgatgtgatttgatttgtaattatttcttcacagttctttcaatgaccgcattgttaaagctgccatcactgtgtatggtattgttgcttactatttgtacatcgagttacttgaaacctttcttccccggattttttaattctaagagatctgggtttcctggaattttagggaaattttctgtagtcggcgacagactgtcgatttatgtatcattatcttgtattttttttgccttctggacaatagcgtttaaataaaatatgttatattaacttgtattttaattgtaatatttttcaaagttggatcataaaataatattaaaatggctacaaattacaacactgtggatattctcccctgccaaactttatatgtatacaacctcaacgatcaaatacatgtagaagtactaaagaagcttctatacgaattattcgttccttatggaatcatagtggatatcgtagctagaagaacgaaaacattaagaggccaagcctttgtggtattcaggtaattttctaaggatcaaataatgttttagtgaaatatcaagtgcaactgcagctctaaagggacttaatggaaggaaagttttaaataaagtattgaagatcgaatacgcaaaaaacagatcttacaaaacactcaagccatctgactactataagatgtcaaaagctaatcgagcaaagcttaaacatgtctcagatctaccagaagatctaagatctagcttaacagatgaatctcacgcgttattcgtccaaaatatccctcatgatatgagcaaggaatcgctggagttgctattcaaacaatatccgggcttcaggggctgtagatttatagaaggccgattcgtagcctttgtcgattattctatggcctctcaggcagagatcgcattagagggtttgaatggatttagagtatctcatactcacgccttacaaatctcactagctaattaaatactaaatttatgtattttttgatatttttttaattgatcattcgttcatcttaaattttaatttgattgcaaactttattaaaatttgacatttaagattcccatgtgcagtttatggccatgaattaattttatttactacttttttaaaatttgtttaattcagtaataaaagttaatttataatgttatctataatgtttttctatttttcgcaaattctgtatacatctttcccgtttttaatacagatttgatatttaattcaataactatccaaatctcagtgtaattttaaatttcaatctcagttaaagttcataatatataaaatattttttaaattcatataatgacaggtaatccacattcttaagtttaaactcatgaacatctgtagaagaagaaaatatcggatgtgtcggaagtttacttagatctttcaaacatttattcacaagaacccccaaatattccgtggtaaaaacagaacctattcctaaagaggtttttgagcccagatccatcaaattcctgaagcttttgggagaaggtttgacattggtgatttaataattatgtaggaggattcggaaaggtctttttagcactgcaggagcaagaagattcaacaactgagctgtgtgcagtaaaaaggcttgagaagtaccctttgatcgcccaaaagcaagtcgaccacattatctccgaaaacaaactcctcggttctgtaagccatcccttcatagttaacctcctgggttcctataaggatgactattacttataccttgtaatggagtatgtgtccggtggagatttcttcgcgtacttgaggaagaacgataggctaaaatcctacgatgccatgttctatgcagcccaggtgacggccatgttcgagtatctccacgataataatataatataccgtgacttgaagccagagaacctgctactttgcagcgatgggtatttaaagctggcagacttcggattcgcaaaggttgttgagtttaggacgcacaccctttgtggaactccagagtacatgtcgcctgagatcatcttgcaccttggatacggaaaagctgtagatttttggactctaggaatacttatttatgaaatgttagttggttatcctccattttatgatgaaaccccctataatttgtacgataaaattcttaaatgtaaactaaaattcccaagtttttatgacgagtatgttttatcattttaataatgtgtagggacgcaaagtatttgacctcgaggcttctagttaccgatccatccaaaaggttcggtaacttgcacaagggcatagaagatattaaaaagtgtaaatggtttgcggccatggatttcaatgcactacttgagaaggatttgagaccgccatacattcccgtacgtctttgatataaaaatgctgttttaggaaaaagaaaaggttgatactgccacggaataccgtggatctgaaggattccctaaagcagtaactggagatgaggatccgtttgtagattggtgatttgtagtatattttaaaagtatttataattgattaaatgtaagattcctgattagtatttaaataagaacgcttaagcgaaatctttaagtgaattttaataaaatgaacaatttatacgtgaatagaatatttaattcataagttgacattagctgagtaataatttgaaaataaatccataaataagtattaataaaggtatttaattaataaaaatgtttttaaacatgaagtacaaacaaaaaacaaaatggtccaattcattatgattacttagtggtataagccacacaccaactaaaaattttattactgatatctgaaatgggattttattcatgattgaacaaatttgcacataaataaatttgatccaaacttcatttaaatacacatctttattgttattttgaacattatttttttaactttttcttcaaataaatttaataacctcagaaattaatattacacattaaatgaagatttaaccattggaatggataactataaattaaagacttttgattcggcagaattttctgcaaaacttgtacctctacacactcagcaagataatctaaatcaaaagtataaaaatactggtaataataacgataaatttaacccatttgatgaaacgccgctaaaagaacactcagattactctgatttatcaaaatctccaacatcttttactagatggatgtctcaatcagcgctccttgataatcttgcaggcgataattcatcaccttctagaggagagtttagttattttaaggataaaaaagtaaatttggatgaagattctagtgtttttgacagtatatatgaagaatttggactactattcgataaatccaaagggtctgaacacaataattcagttctaacatatgttttatccaaaggttctgacgatgatttaaagatggatgatgaaattttgtctgaatttaccagtttcaaaaagaaatattttgaattaatggacaaatcactaaacgacgttaggatgaagagagcatttcttacagtattgttcaaccactacggctcctcaacaatctttaagtatatgacatatcatgaatatatgtcaattctgaaaacccacaacgtttttccagacgaatcggcatcaaaattcatgttccaagccatggataggaaaaataacttgatgttaacacttaacgaatttgtttcaggaatgttatcatgttcccctgaatgtgataataatttgaattcttcgtcaggaaagttgaggttacagcatattttcagagcatacgacccagatagacgtggatatttggataaagattctctagacttgatgtttgatcatttatcccaaggctcaggaaatgtttataattcagaagagaaaaataaattttcagagaggctgttggaaatgttcaacggaaagttgagttatgattcattttattactgtgttgagaatggactattaaaaaatacaaactcactcttcagatcaaaacacgacacggcaaatttatttaaagattttgttacaaatgccttgcttaaatttagtaaaaattcagcttttaacagtcccgaattatcaagcaataccatgtttgataccacaaggtcggttagaaatacttcaccagataaactttcccatcggataacgcaacttaattttcaagaaatgagtaacaactactattcatatagtaatcaaaatctgacattctcatctacaaccaaaacgtcattatggagtcataccccaagagcatattctgagtttacacataataaatcaccgagtaaggattatggttcaagttttgatagtaatttttacaaatctccattttctccgccaaaatccaacacgagtagactcgaggaactttctaaattatatggagataaagcctacgacgatgaaaataaagaggatttttttagtaaaactccaaataatgaacaaacaccacccaaaatagataaattcgagtctgaagatattttccaaactcaaaatgttaaaacaaaagacgaactttatgaaaaatcgccccccaaacaagaagtcttcgatgatgcattgagctttaaaataccagattcaaatgatagaaatgacaaattagagcaacttttggagaagcttcatcatcctgaaaaggccagtctcgaaggattggaacccaagcaacttgtgaatcttgagggtgttgaatcatttgatgatgtgttcgaagatgacactcaacttcaggaacaatataaggagatgagtgactttttcgtttcactagaaagcgttgaggatttaattcagaatgaaaaggaggctgaactaaatgaaaattttaaagctgatgacgacaatttgacatacaattttgataacttagaccataaacttgagtttgaaaattcagataaacttgttgataatgaagagaaccaacaggaactgatgaaattgatgacatttggagatccatataccgaaactaatgaagaagctaagaagacttttgatgtactacctagtgaatcaccatctaatttatctgattctaacaagcctctagtgaacttgacactccagaccctcactgatctcatttctaataaatataaatcgaaaattttagtttttaaaggcctgctggttgatgatacagttgccaaactggttttgacaaactttatggcccactcatttgatgagtcaaccgaccatagtactatgaagtggtgcacatacagtgatattgtgaatctttgtgactcagcttgttatattcttaaaaaggaaaactctttgcttaatttaaatggagaattccaagtctattcatcactaaatggtgacctttcatgtcttctcgacctctttaatgcatatggatggccaatgactaataaaaggtgtgttgatgaacttgttaaaaccgggaccttaaattttaaaaacaataactgttttcaatttaactgttcgtatctcttctttggtggttttgtctctgattctagttcattctgtttagaatttgtgcttttgctgtttgctttgaaggtgctgtttcctttccatgtgtattttttgagatcgagcaaagatgaacgagattatacaaataatgcagggttttacgacgagatatacaggaaattatccactaattatgattcactcaagttgctcaacgacgagactttgttactccagtgttccaaggagctctttcataaaataaatgacgtgtttgagtacatgccagtttgtgctgttctaaaccaggaggttctttgtgtggataaactgacgagcaatttcaatctttcgaaattagagaacttgaatagacctctgactctttccaattgtgataaggagatctacgagttgctctttgaaaacaaaaatccaggtgacaagactacaaataacaatgagggtctattacaagatactggtggatataatacagttaaagaagaagataacgattttggtttgggtgaggccaaaaactttaagatggttatttgttcatctgattcgctagatacaggtttcaagtacacttttaataataaagttcttctattatcaactaacttcaacaggaagaacgtggaaagggttgccacttatctctctataaataaaagaaaactaacccacatgtctcttaagctgtgatattaaagttaaaacatcatttgtaaaataattaatatgatcatttaaataccatattcatatctcttggggtttttatgttatttaaaattgtctcataagttaaatcctccagttttaaagagtccttgatatgaaaattaagttttttagttcgaatctgtgataatattttacaatattttattaccagagaagccattgttgctctagagtttagccttctaccaatatctctgacaacgcttctgatgtaagttcctccagaacagtgaacaaataaagagaagttcggtagctttgaatacatgtacgtttaataaactcacctcttcatttttaatgcgataaatgtcttttatatggacgagagatgatttagagggaacttggatattattgagggcatattcgtacatgggaatccctttgtgcttcttggcttcatgaattttattaaataataaagaaacctgaataagtaggcgattcttgaacctggaaccctttaaggctccttatggccttttcaagcatttcgtctgttatgtattcccaattcgatgtgtgtataattttcccctgttagagcattattaacgttgaactaacaaggatgtcattcgtgtcagtttcaaatccaaaagttccagtacatatatactccttatctcctataatttaataggtttgtggaattaaattttcagttacctttaagatagctttcaaggattttagtcccatctccgattccaactgcaagaactcctaaagaaaaattgtaaattaggttcaaaccttcagtatatctatctagagttcctccgtgacccactggaatcttaaaactaaacaatgacatggtaaaatcataacacaccccttattttttggaaaattctcatttattatattctttattttgttacatacatatgtagaagatactccataaggcttgtaaacgttcagtaatccactgggtttgtatgatttttcactaaaagtcagaacaaacttacataggttaaatagtatatagaaaaaacatttacttaatatttgcataaattaaagtaatatatttttgtgataaaataaataaaatgcaacattgaatttaaaataataagtgaatgtgttgtattaaaatgtgaagttaaaattattgtataaaaaatcagaaaaagcggccaaagcttccaggattccctggaccaaaattgggcttattgaaatcaaaatttggaaaatctgatgagttcttttttgaagtgtgtagtggatatgtatcaatatctggattcggttcgcttcctaatggtccaataacgtcatactttacatttggaggcaaattcctaaaaataaataaaaactatgttaaatatgtttgaggtttgaagatactttttggcatatctttcttcttgaaagaatggattgtcctgaccaataagcgttccatcaggtttacacacgggagtctctttatctaataattataaataattcataaataattttatagtaaataaattatgtaaatatattctaaaccttctttacgttgtaaattcggtagaagatggaggtccttatttaatcctctattagactgtacatatcatgaaaattaaatattaaatacttcaaaatcgaattttacatcttcaaatggctttttatgtagtttatctagttcactgtcatcgtcagataagtcatcatcgttaagatgggatcgtgtatcatctccaaaattcataactactatattaaaattttttcataaaaaaagaagttttatttcatttgatatttaagtaaaacgaaaatgacttaaaaataagtcacaatatagatatatgtaggggttgaacaaataatgtgtaattattaaatataaacagaatttattaggacgagataatataatgcaaagttatgtttcgaatcaagcgatagggtcaggatgggaaatggatcagttgtagaagaagaatttaaaagagcaataataaggatatactattgatttggatttgagtctaggggagcaggaagaggaaaatgtgtgtataataatgataaagttagtagttaaatatgttattgaggtcaaatactctggatattgtaaattttaaagttttataaataagaatagaaaataatgagtgaacgaaaacttctctattggaagtgaaaagtgacatatatgtcagctcgtaatataattttgatgggaaagaataaaccaattttgatatgtgtatagcatttgtcgatattctgatggtaaacgtaatctaaatgctgtggggaatccgagtcgaaaatggtcattttgttacaaattatatctttctaaattgggtaaaatacatttatttcaaatttaaatcggttttccggcaagagttttcgttttaaaagtacatttttgacatttatcaatcataaactgttaagttaccatagttggtatattctcaaaaatattttaaaataataaaatttatcattaaaatgtccatcgagccttttattggaactaaaatttcactaatttcaaaagtagggatcagatatgaaggttggtaacaatcatccaatcaataaataaattatgtagggtctctgcatagcttaaacactgatgactcaaccatagttttaaaagatgttcgttctatgggaacagaaggaaggtcaacgggaaatgaagtaccaccatctacgaaggtgcacgattttgttgttttcagaggtaaattaggttaaaattttttaatattatataggcgaagatgtaactgatatacttgtaaatgaaacacaaatatcaaatgatgataccaaatttgaagatccagcgatttttaaaacatataaagaagacgagttccttgttcaaggatcaaaaccaagatttgaacctaaaaaagaaaaacagccatttttaagagaagttggtatcgcaatgcattctgaacctccatacaaaaataacgaaggctttcagtcttttgtgaatgacttgacggatatgtcaaatgatttggaaaaggacttggaaacatttcaatttgatacactagaaggactagatccatcatcatttccaattaataaaccattaaaaccagcacacaacttaaatgatgaaaatcatacacaagatttatcagataacaaggaaaaacaaaattctaaaacagagtataaagtgttttatgataagaaatcattttacgacaatttatcacacgagaagaaactttcaaaggtaaaatatataatatactagtaaataatatgaatttatagagtgatcttaaacaagaacacatgaaacaaagagaaatagacatagcgacatttgggaaaatgaccattaggaattggcatagtaggaacaactcattcaggggaagaaaacataataacacaaaccagttcaatgttaaggcgggttgggaaagaagagatcagatgaataacagaaatagtgaaaatttataaaccctttttacaatggacctaatgtttttgaaaacgaatgttatatgtaaaacattttttaaaataaaatataaattatacaattataaagattttataattttactgatattttattaaaataacatatttaagggccactatgttagtaaaacttcacattggttgtggaatcaccactacgttgatcacatataaaattttcaaacaattaatgttaaaataaaatgttttacacgatttgtgttattgtataatatataaaataatgagaatcgagaggttgagcaactgttgtggttcaagagggaatttaagcgcagtagactttcagccatgctcaaagcataacacaacacaaagaatcgcaacatcaggaggaacgtatgtacagatatggtcattatcaaaaagtgaagaagaaatatcatcaaatccactcaagtgtgtactgctgtacaccttcaaagatcactctccttatgatgttatgactgttagatggtcaccaaacggccaatacctagcaagcacagattccggaggaataacaaacatttacagaagaaatgataagaaaacagatataatggaaatgattgtcaaatcgaaattatcaggtcaaccttccgagattccacagtcgtttactgaatcaaaggaagttaagaaatatactgtaaaatatgacggaacagataagtctgttagcacaaactccggagttccaaggatttcactcagctctaaaaatgtccaaattgagtccaaggaggtaaagctggacaactttaacttgttaaaccaagataacttagaagggaatctagaatcctgggatacctttgcaaccttctcgtgcccacataacatgggccagctgttcgatattagctgggcgccagataatcgcagcatcatagggggaggcatgaacggacaagttatagtatttgatatacacacaaaggaaatagtagctaagtttgacgccctggaaaagtcagaagatacctcatcaggtagaggatatattaagagtgtatcctgggacccaatgaccctctttgtagcagtacaaagtagtaataagcagatatcaatttggagaagatcaccaccactaccaccaggctcaccaatgaagtggacattcaaacgagtgctgtatcaggataatttctcagaaaaaaccaatacggatgttttaggaggatcaaggatgtcatgggcaccaaatggtaagaacgtagtgtttccaaattcatcttcaaacaactataacttctcaacctgctttcaaatcaaccacaacgtctcaacgttctctcacatattcaacaaagtaaactatgataaaaatacagcccaatactactttgatacatcagaacaccaagtagactttgaacctatattactgaagggacataatacaaggatccggaacgttagattctcagaagatttgatgaaaccaattaacgatgtacaaaacaatgtaagatatttgttgttggcacagtcaagcgatgataacatgctgtcagtctggcggttcaagctcaatgccaactctatagtggatgttgagtgcttctgtgtaataaataatttgttagacgagcagtccagtatagaggatttatcatggggagattttggtaggtcattagctgttgcttcaagtcaaggaggcctgatactaatacagttcacttatgaagaaatgggagttaagttccatagtaatagaatcgtgggactgaatcttaatgaaatgaaacatccgtcaccagaatttttcacctactcagactacgttaataagatttcagatgagacattggattctcaaaatacagggctaaacccgaactcaaataacaatttaaacaataaatctaaaacattaagtgaactcgcagaaaataatcagtttgatgtaaatgaatgtataactgacttaatatttagctataataaaaatcggaaccaccttgatattagtgtgcaaaatgacaaaacaaaacttttgaatgatttttgtgaattttgctacagcatgtgtaggttattgttttactattatcgagcttatgtgtatgctctaagttgtaattacaatgaaagttgtactttcccatcaagaaaaagaccattgacaccatcagacctctataacctaaagtactatcactggttctacctgtttaacttcacaattgagagtgaggcaaagataagccaaactaaaagaagaagtaagagtaaaaaacaaaaaactactcaaataattgaagaaatgataaatgacgtgtggctagatatggactacacatcagaaaatgcacttgttagtaattactggaataacggagaattaacaatagaaattccagtacaaacagaacagaacgagacaaatcttagcccactgaattccaactcaaaaattggaacaccagtgtccaaaaatgatagacaaacaaagaatccgtctaagtactcaaggccggaaaaatccaagtttaataagtcagatagctcaaactcccctaatcttgatttgttcagaaagttttgtgaccagaacggtattcttacagttcctttagtcaagtcgaaagtgtcattttcaatcaactcaaagaagattttgggaatcaattttttaaacgtatcttctagaacaatgagctcggtcacctgtgccaatgaatctgaacttaaaattctatgggtgcaatatttaaagagtggatacataacacacatggattatttcggagatttgttagtagttttaactcagaaaatcgaaggtgaatgtaaggttcacatgacaatattggatacaaacgaaggaagaaatcacttgaatgaacatgagttaggaaatgaacctgtatgtttattttatttagtaacatggacagaaacctattttatattcctaacaactacactgcaacttacactacttaaatacggtttcccagacactctaacagtattttcaaactttagcttaagcaatatccaacctgaagagatactaaagataggggttttgaatgcaactaaaaattatgaaaccatattaggacaaaagctcaaacataacgaagaatgtttgtttagtacaaattttaaatgtaattgtgaaaatatagtgtctatagtttacagaaaaaataaaaaagtaagtgtctttgtaaaagggtataatgagcttgaatttaattttgattctttggcgctaaataatgatacgattgaagccgaacttccaacattcacactcgattcactatttagaatgtataaggaggattttaacaatgaactttttggccacatacaatttgacggctcattgtcaagcatcatagaggcattcaccagtgattataaccttaataaaggaaaaggaaacaattttcctgattttcaagatttgaagctaagactgcaggcttgcttgtcaataggcagtgtctgggagtatctgctgtacctctatgactactttaaggtgctattcgagtcaaaggagttggtattagtgctggaactaacaagtgaattgtataagttattattaggatatttgaaaggaaccagtgagtccgaaaaggttgaagacttggaaatatacgatttcacaaactatttcaacatagctccatacggcttacaccttgttagacgagttgtaattccgcagctgaactttatttacaagtttttgaacctagattcggattcaaatttacagaattttgatgatcttttggaaattaacggcaagtgtaattgtttaaatgttaagttttttaatgactactcaccaagactagattacggtcccgaagatgccgcatcattgtcagaggtattaattatttaattttttattacctagataattataaatgtgttgaattaactgaaatttagaaattggtcaggtttttcaacgacgttagaatgtgggagaattcacttgagttttaataattaaatttgtacaaattcaacatacccacaactgatgatattggtagttatactctgtataataattgttaaatatatatagcaagcataataattgttatatatatatagtattaatagttgtgtaagaaatagtttgaatggaatattagtattagtgttcgtgcggtctaatccttttatgggatcgagagccttcagaaggagtgaatttcttaaggaggtttacgtcaggctcttcccaagttgaaacgctgttaccttcacagcggtgttcaatatcacccttggccagccttttcaagggatcctcagaaattgatacgtggcctttatcaagcttctccataaagtcaagctggatttgataaagctcatagggataaaaggacatcaagtatctagggtggttttcgccgtagttaatgcccctttcataatacctgcagtgcggcacttcatccttgttattaaagttgtaacaaaattgattcataggtgggacagtgtaggctgttttcatactctcctcaggagtcaagtgagatacgagatttccttcgtgagtactgtaggaatttgatacgtcaattctgtcccagattccaccttttcttgccatatcactgtaaacctcatcctcaagcaggatacccttcaacaacttggggtccatttccttggcactgtttgatctattaaaggatataacaaggtgatcattgtttttgaagatgaagtaatcgttctttttagcccaaaatccagtcacaggtttaactttgtactcatctaaaagaagcatttcctcagcacccacattagtgtcaaattctccaggaccaggagcattaaaccttttattatcatatttatagacaggctcgaaaaagtggccttcaggaagagaaatataaatgtaatcctttaaaaatcttgcgtaaaatggtttatcaagttccctgggtgcattttcattaagaaattttaccaacatttcgagagtgaatggagaatatgggaatgtttgaacatcacataacttgtcacgctttgtaacagtttcagttgaagggaagataacagagtatttaccagttttatgaactgcatattcggtaggattcttaactgaggatgaaaccatttttgagatattctcactagtaaacttgtttgaaactgactttttaacagtgattaaaagacggtcacccgtactttttaatttttgtttaacactttggagttgttctttaaaatctgggatgaacttcttaatatcgtttggaactgttaatacatggcctgaatactgcttcattctttcagataaaattttatgtggatctcttttagtagttacatactcctgacctgaagggatgagtttcttcgggattggaactggaagagcaaacttggtgttctctccatagaacccaacttcatgcgccattgttacaaacaagttatcgtaacaacctgctctagtgtagggatttcttctagcccactccagagcgtcgtcaaagtcaaatttattaataatacataaatctccaacgggagtgctgaagttcttatttaagcaagcatttcgaatcttttcgttctttaataattcactggtgtattctttcaatggtaatagttgatgtaatggtagacttaagtcgtggatattatcttttcttgggctttttaggttaaagtatgatttgacacagtttgatcggattagaaatctgtccattatatcatttagcatcataaatggctggtcttttgaatacttacctaataatatgctttattaataatcttaaaaaacatatatatattactcaaactatgtaatacctagtataatgtattccctagggttattgatgtcggtttccttcttagaagtcagcttatctcttaatccatcttcagcctcaaaaatgaataaattcttataaaaatttgaccttgccactgggtcgctgcaggcgaaatccatggcatgatggagtgtaggagctgtcataaagtatagtacaccgacgttgtattcaacgggactctttttaaggtttttgtagtattctcggacgtccagcttatttgaaatagtgaagatttctgaaaacaaatgaatcaaatgaaaataccatgggtgaaaagttttctagtgtttagtttatagagtttaatcactttagatgtcgacttgagcatcgttgtagaaagtctagcccatagtgcttgtaaggatgtaagcgatccaacaacattttcgtaatctttcctaggccaaactccatcttcggaaatcatatatttatacttatctttgttgatggttttatgttcatcgggaggtccagaactgataattgacatgtctcctttctcaccagtaaaatgctctcctggagtgattttgtcattggagcacaaaagtgttccatccggagccagagcatctcttgatgccaaaaagttaaaaaattctccgtatctaaaaagtcctgaggataagcgaggtggtggatcaccatccgttagaggagtgctacaccagtatgctgagggatcgtctaaaaatgaatttaattatataaaaatacctttaccgtcaggcgggtcaaataatcctaaaaccacaaaagtcctccatcccataggtactgatgggactggtttatcacactctaactcaggtgcgttttcaggtctctcaaccttcaaaggttttatttcactttttacaacctcgccttcatcaatgtccaaataaaatcctttctgatacttgaaaaacatgtcataactaagtgtattatagtaaggaccgagttttgtagaaatgatatcatctagcttagtatcatctgttatctgaaaacaatcaggtaaagagcttggaggcatcaaatcttttacacagcgaagtgcagccatttgagaaatggcacatggcattgggtgtttccagttaagtctatctttattttcaggctggttgaatgtattcaagaaatagtcgaaaaaatcctcattgttgggaaaagtttcaggctcttcaatgggataaatttctgaaaatggtcgtttttcttgatcatgtgtaacatcagtagtgacatatgatgaatcggttgaaaacaaattagtatagtgattaaaagatttagaagtgacattagagtgtacagaaacaaacttctgagtggctaataatgcgattttagaaattttagactcaaaagtcctatcataacaggagttaataaaacagttattatacaatccatcataatataaagttttatgatagtaagaatgtggaatcaaggaatttgttatcgaaatatctctgatggaaagaggagaaggatttctaacacatttatttgtgtgatatagcgaaaaaacatattcatttgagatttcaattattattaaaataaaagttgctaaaatcgacattaaaatttaaaagaatcatgttacacattaacaccgttggaagatagtaaaatattaaaatctgcgataaagaaataaaataatttaataatacaaaaaaacataactatgtgtaaatatttaatactttaaataactgatagtaataatatatattgattaattaaaacccaatactattcatttaataatatacaatattcttttatttggtgtaaaattatatttataattgtttaaaaaatatatattcataataatatgtataattattcacccagaatgaaactatttgaaattatttggtgttatgggatttaattctaactttataggtattcacatttttcaatattatcctctcatttagggtcagttaaaaactcatttgcaacaccaacaatagaaaatcattacattgaaaaactattttccaaacataacgttgcccttgagtctctacagagctacgtaggagatgatgttatcaagttggaactgtatctcgtcaattacatcgagaatattaatacctcaatcaatctcaatgtatttgtacaatcaattctacaatgttttcataacataagcataaatacctctgattttaaaacgtttgaaaataatgatttgctgttatctcaggaatactctcaatataattctgagtatataaataacaagattaaatatttgaaaatttttaataaccctttgtccggccaaaataaattaaattcatggaataatcgactctgtaattcatactgcattttaaaacattcaatgaacctagattttaaatctcactgtgatcattgtaaagacttgtcagatttactggacacgacatatatatgtaaactcttggttttattcagaatacttaacaaaaccactgttttggagagcatttttatattcatatttaaccaaatcgcatcattttattggaactatgaactgctcctggtaacattctcgaatgtaattttaaaaaatcttgtcaactcagtcagtttgacgcaattaacaaacagaacatactgtttatcggacacactacactcattactagtaaataggaataattatttagatgtaaaataccctcacgcggaagcagtttttagaattttggggaatttctcaattgtgagtttaaaacaattaacaggtttttagaatatttcattttattactcaaattttaatatatattcaagaaataaagataacacatttgttaacctcttcatctcacttatcgtgaaacatataattaatgcatcaaaccagtcaaatgtaaacaaagctctaccttacggtctatttggactgaagaccaactctcaaaatgaattttattatttgaaaatatttatagagtcgtttattaaaacgatttcagacaaattcaaaaaaggtcatgtagtttataacctctcaagcatcaacacgttcctggtatgtcatggtagttaataattcattaggaccaagaaacgtataacttcatagtaaaaacaaagttcaaaagttatttaaacgaaacagaccagttgcactgcagaatagcagtgttgcttttgtacataatcgccaaatataaccaaattccaaatgtaagactgaatgaagtctcagacattaggctattgtacagcataccatggtctccagcaatagaatattgcacaacagatcctaaacttaaccacatgctcccggactttaaaaaggctgtcatagaatgtttcggatctgaaatattcatttgcaactgtgtttacacatcatataaaacgattttaaatgattttgtaatcaacactctagtcaactataataagattggttatgacagttactaccggaacatgttttacttctcaactttagtgtcatattcacatatggtccttattcacaggagaaaaggcccacagttaacatttgcctccgaatctatatactacgcactctcaaacttcttactgttagtaaaattaaagaatatatattttagggataattgtcttgcaaaccaaatctccacaaataacactgaggtattttaaattatttgtagaattattagttgtctaaggctgcaaagttttcaaagtctgtggaaagtaaatggatttcacactatttgacaacatcatacctcttcaacaagtcagcatcatatctggctcttcttgattcactaattttgtgttatataattgaaaattcaagtgaagatgaagaaaaattaactcttgattctctgtatgaatccacagttaatcctgatgcatcgctggactttcaaaggaatatttcatctaattttctctcccttaatcagaatccaatcaatttaatcctgaggatccctgttcaaactctagtagaattactcaaattcaggtacttcatcatgctaacaagtactgtaggctgtttgggaaccttttgattatcctggtttctaagctgaataaatacatatacgagggtttctcaagttttctttcctccacaactctccaaatagacttgtttcaattgtcagctctccaggttagacatccataatttatgttcattaggtggtttccatgataaacgtattcattgacctttcaaagaactttactagtgaatctgtaaaacagtttagaagttttgtcgtgtgtttgttgtcaaagaatccaaacagctatgatctcattttatcctccggtttatcacaaaactcctgtgtcaggttcataaatgatttgtttaatccagacgcttcatttaatacgtctgctggaaacttcaagcactccttaagaatacacagagaataccccaatgaatggttagatttttagttaaatgtgttttagggctaaaaacgacatttactctaaggagggcgttcaatcactcaagacattagaacctacggacaggatagatgtcgctctatttcacttattcaactttcacttgttgtgcatggatactggcctttcaaaggtattgtttgtcataataatatactcaggaactcaatgaaaactccggcttatttctccaaattgaaggtgttgtaacagctttctggcagtttattcaggcggtgacaggttatattgctatagtgtaatttttcttagtttctgagataacaaccgtcatcaggagttcattaagcctaatcataaaacttcactacctgtacccggctcttacgaaaacgtccctctgtaagcctttttaatcttattattatttagtggaaatatcaaagattttaaacagggaagatattacgtcgtattcgaagaactccatagagtagtttaacgaactcacatgatgcacatagggaaattgggaacatgttaaaaataatagagtataacggcttcatggtaaataacaaggatggtaaaaagcagtagaaggtgaggaaatgacgtttttataagtgtatgatagatcattaagaataatgtggcaatatctacatgatatctattaaatatgggttcatttattagaaaataattaattaaattataataaataatttaaaatttaaaatataataaagatggctgttgacacccaaaggtgttcccgggcggtcccccaccccagtactatccgggcctagcaccgcttgacttcggagttcggatgggatccggtatattcgatgcagtatggccaacagcaagagtaaatatatttactcattcatatatgttaacgaactgtagaaatgatagttgttttgagtattaagttaaatgattacaggtatagacataaaacacataatgactaactaataaatcaaaatttgtgaaatatatagctgaaaaggtgattttaaaaaatatgcaaaatgtgtaggcagaattctgcaattaataatgaggaggatataataaatgtgtaaatgtagaagctctacaaatttaaaaaatttgttttatgaaaggtttaattctgaaaataataaaaaatattcctattagtctaggcaaattgtcatggggtataaacaagtgaattaacataaattatataatgataaataaatatgaaataagcaacaacttttcatatgactcaaaatcgactaccccggataccgactattttaataacgaaacctacgaaaagttcgggtactactgggagagtcagagatataataaagcatacttcagtagagaaataaataagaagttcaaatactatgaccagactaattttgttaagtttttgttttttaactgggttaccaactgggcgtattcgttatcaaagtcgtatatcgagccatataaactacacccgttgcccattaacgaccagatactctattggcagccaattttctctaaacatgttagtgatggaattgtaagactagaatcaaacgggtatttcgatccagacggtagaaaatacgttaaagttagaaagtctgttctactgcgtgcactctttctaacattctggaaaaggacgctgattgtacttttgtcagttataacaacaaatgtttttagtatgaacatcgcaattctggttaaatatctgctaaaaataatgaaaagccggtcgtttagcctagttaagatcctctcgctgctattcggcattctgttcttgcagattgtcgatggattgtgtactgaaaacttgacttattacatgtatagactcgtacatatcatacaatactgcgtttcaatcactgtgtttcaacacggcctctgctatagaagaaggttctttaatcatgtcaacggagctaacacattgaatgtatgcaactgcgtcttgcacacatgttcccctgagtcggtttgctccgataacccattcttctgctccgcgagtcgtttccaaaacaaggaaatcactccgaggatgttcgcatttgaattcatcgattcttactacatttcgctgttctgcgagtctatagtttatacttttaattttttgtcgaactccatatacggagtaattttaatatcgttccaaatgagggtgaatatgtgggtgctgtcagttgttggagtgctcttcatatttctaatggtagtggttgaactcctcaacacactcgtcctgaacgctatttataaaatcaaggactatagaattgcaaagtcaattgagataatctctgcactacccatcattaacaaaatcctctacgatgacatcgcaattaacgttataacagaatgtaggaacagagagctcactataattataactagggtgttcttgacttttttaaataaatcattatatgtgatatgtaacagtttgtcgttttatatcctgataaggtattttgtgaaaactataaacgacgttgagcttgtcacggaaattgacacagagggcttcttatcgacgttttacatattttttaaaattatagattcgttaaacataatacctcacacaattaaaaggttcgtcaccgcgtatacttcgtactatagagtgagcaaattcatcaacaactgctcacccaacttttatatcattgacaataaattcaccggttcaattgatacgtcggatgatctggttctttctactgatgaactggacaaagacgttgttgtactatataaagatgcctccttcacttgggttaacaataggaaggatcttgacagcttaaaatatcaaccttatctagagaaaattaacttccagcttaaaaggggagaaatagccattattagtggtaatcaagggtgtggtaagtctaacttcatcaagtcggttcttggtgagatgacactaattgagggttcaatggcagtagttccacttcacacatcaatgccaatattctacgcttcacaggaaatatggctgcagcaaggaactattaggtcaaacataatatttggacacaaatttgatgaagttttgtataacactgttctaaaagcggttgagctggagtctgacatttcatcgtgggagaagggggacttgagagtagtctccaactacgcatactgtctaagtggtggccagagggtgaggatggagatggctagagccatctacgcatatcttgtattcagtaaggttaacagagaatataacagaaaccagtgcacattcttgatgtgcctagacgcgcccttccatggattggacccatttgtatcaaggtcagtattccacaacttgtttaatctgaagacaggactattgattaaagacgatttgtcgattatcatgtcatcgtcgctgttggttcttgataagtgtatcagaacttcagaactaaacatgttcccaaaaatccctatatacgatgtaaacaagaactcgttttcattcaactgctacttgtcagacgtttactccaaaaaattacccgcggagaaatttaagtacttttcatcaatcaacaatacgaaccacatgaacttcctgacgaaggatatgttcggcttttgttattccggttctaccacgaggataggtcggccggcagtaacaaaattgctgtatgagcattcatttaacgcaatagttaaaaacgattacgcaggagacaagtttaacccctacgcactgtactttaaagcggcgggagttacatttggattttttattattctgacactcgtgtcaagtgtgatggataacgtgaagttcatcctggcaacaaacctgtcagactatatagccaaatgcacaaaagagtaccaggaaggaaattcgccgaatctgatggaaatcaagtctaaaagtaactcactgttacagttcttcctctttttcatttgctccataattatcctgtccctcacctcgtcagtgttcctgtcactttcctgtatatactcatctcgtaaaattcacgagtactgtatcagatccatattcaaaaacagctccacagttatcaagattaaaaagttcacatcccaggttgtcacgtacctgtcttcggatatattccagatcgacgaaggactgggatatgtcatatcctcaaccttcatctccctcattgagttgttcattcaccttgtaacacttttctatttggtcccaatatcaactccaatcatcaccatagcgttgtttttgatttacaaactcttcattaaccagtacgtgaagtcgtcgaagtaccttcagatgggatccttagagtccatgggacatattaatacggtgtgtgaaaatgcgatttcgggctctccgattttcagaagctttaaaagagagtgggagttcatgcacaacttaattgagcatacagattactacatgaggtgcagattcttaaacaagtccctgatctcatggacttcaatactgtcaaattggtcattctcagtaacgacattcgtcacgctcttcattccaataatggtcgataacttttccaaatataaggtgaaaataggttattttgggctagcgctgtcgcttagcatgaacgtcatcaagacgttcaacacttttgcgacaggcatggcgaggctggagatttacatgtgttcagtcagaagatttcagctgtttattcctccaggcaccaagtgcgtgtttgaaaagaagataaatattcacgaagaggaccttgtcgtaaattcggcatgcacggacgtcctggccgagaagaagagggtgttgaagaggagagtaaatgagtttaagtctactaataagaatgtactattaaagcttggttttagaccaaagattaatattatagatattgtcaagtatctacctccagaacactccggagtggttctgaaggatgtttgtgtgtacacaacgcctcaaatgaacattgagggtcgaatcctcaatatcgccgacgcctcagccaagcccggagacatcatcggtttaattggcagaactggtgctggcaagacaacactgttgtcagttctccaaaacactgttcggaatagaaccggccaagtcctgatggatggtagagatatgagagatattccgaggagtgccctgagacaaatagttggtgttcttcctcaattgccctttgttttcaagggctggaccattcgaagattcttggaccctaggaaactatttagcgatgatgagattaacgaggccctggagaactgcggccttcttgaatttgtgaataatctccagggaggaaagagcctcgattcggtaatcatcatggaagatatcacgatagaatctaaagaagaagagccttccgctcgaaaaactaacacttccctttcattcaagtccgaaaccaggctaacaatggactccctcaaatactactacgacgaatctgacatgttgttatccagtagtcaattaagaactctggcatttgccaacctcgttctttatagagcattttacaggatgatcctggtcgacgagcccccatcggacaactgtgcacttcaggacagtttcaaccatgatctgggcctcccgatttacgaactaattaaaaaatattttaatcactgttgtacatttatagcagctcacgaggcaaccgttttaaggatgtgtacttctgtgtgggtaatacacagtgggtcgatcataaggactgtcaaggttgaagaaatttcagccaatgaatcaatttcaaacataattgaacagagtgtaaataacaaattaatgtagtcgagtacacttatttacaacacattttacatttacaatttcttgcgcttggtgtctgaatcacatgctacgtatttcatgttacctttggaataatagtttgattctttgtgctcttttacctaaataattttattaacattataattacctcttcgtctgtggaaccgaataggtctgggcggctagttacaaactttatgagattgtttccgacgtctaaaacacatataaatcaaaaaacaaaccctcctgaggtgccagggcagattcggccatggctttttgcatgaatttatccttctcttccctaaaataatcattcctaagaaataaaggtacttccacttcggatccagcagtacgattctcaagtgctcagacatctcggatgctggaacaagctgccctgtgatagggcacttatgcataacttgtcctgcttgctttctggtcctagagtaagcctttttaaccttgattgtttcatctccctcctaaaatgacattacttggttttaacctaacctgaacaatcctggtgtcatcccttataggaacatttgaaggaggatcagagaactttgatggttgagttgagtcttcaggttcaggttctggcggtgcttcttcgcgttccgttaatacttgtgtagtaaccagctgctctgacatatcgattttgttctcaatttcctcaatatcattcacgatattagtctaaataatatatatttaatgtaaaacatacttcttgaacggtcacgtcagttttggttccaaaaagtgagttgtaggaaaaccttaataaagcctcggggtcagagaagtctataggtgcaggcaaatcatcatcgttctaaaaattttttctgaaagttaattttatacctcgttgaatttaattgtttcggcgataaaaaaggaataccagtccagggacatcatctccaacttttcctcctgctttctcatttgttccgattccagcttttcagcttcacgtgcatcccaatcagctcgtttttgacatagttgtaggtaaaacagtttatttttacttatttggtttagtttatctatttgtgatcttggcggtagcaagcactttgtgtaagaatctgtgagattactaaaaaatgtgaataggtagtgtgatgggtttaagaaatcgtattgggggttgtttttctcccttttatttaagtcgacaagaaatttgtgcccatttctagcaacaaacaatgctgtattctttataacctcgctaaaaattgtgttaacgcaacttaaactgaattattatataaatatatataattttagataattactaactagtctaaggctgatatgaatggcatagtgaatgagaataagtcatcttcaggcttctgtactgattccgaggagtgcctaaaatccgatagggccagtaacctctccttgtgtttagtttttaactctaatttttctcttttatctaatattgcttggggaatcgacggattaaggtcggcaactaaaataaacattaaaaattaaatagaatgttatggaatacctttattcccctgaagttcagataattttagtttataatacaagtgataggcgtttcctggctccaaaaagttaaatttaatgttatcatttaaagaagaattcgattggtctaatctaagcttagatacgaattgttctccattttttgcaacgaactcagctgttttatcaatgacggacctgataaacgagggagggaaaataatatcctcggatttatacataatttaaaaatataaattataataaataatttaaaatttaaaatatgataaaaagggctgttgacacccaaaggtgttcccgggcggtcccccaccccagtactatccgggcctagcaccgcttgacttcggagttcggatgggatccggtatattcgatgcagtatggccaacagcaagagtaaatatatttactcattcatatatgttaatgaagtgtagaaatgattgataaaataaaaattgtttatttaaattgattatacgaaaatcttaaatattttgatggcttgattaatggattagaaggtaaaatgaagtagaatatatgatttagaaaattcctaaaatgtgtagaataaattttcaaataagataaacattaatatcagaaatgtgtaagagttcgagatttcgaatatccgcaaaaattattctatgtaagctttagttatgtgtagttgaaggtcatttaaccaatgtatatttgctgtggggaattaaatacatgtttttcataagatttttattgtatgtaacattagtatctctttaaagcaacatctaaaaagctgatgagatggtgtagacatggaagaaaacgatatcgcactaaaaggtgcgggtaagagaaaaataaatcacgatgttgactcaaattatctaatatggaaaagcgaggtatacgaagagaattattttaaaagaactaacaaatctggatataaatactatgatacatctgggatttttaagtgtttgttttataactgggttaccaactggacatactcgttatcaaagtcatatattgagccatataaactacacccgttgcccattaacgaccagatactctattggcagccaattttctctaaacatgttagtgatggaattgtaagactagaatcaaacgggtattttgacccgaatggtaaaagctatggcaaacagataaattcggttttaatgcgtgcactctttctaacattctggaaaagaacattggtcgtactcctctcggttataactacaaatattctgagtatgagtatctcaatcctcgtaaaatttcttttaaaaaattttaataaaaaaacactcacccacttagaaatatacttgacgctgttggcaattacttcagttcaaatcgccgacgggttgctgaccgagtttttcaattattatctaattagatggagaattgtatgggactactgcgtgctgattacagtattccaacacggcctctgctacagaaaaaagttcttcaataacgtcgagggaactaatgttttaaatgtttgtaatagcgttttgcacagttgttctcctgactccaaatgctctgaaaaccccttatactgcccagctaggaggtttcaaaatagggaaatgaatgccaggatgttctcgttcatgatgtatgacgcgttccatgtggccctgttctctgaatcgatagtgtatgttttcaatttcctctcgaactttgtatatggagcgattttgatttctagacagattaaaattaatctttggctgttgtatttaatagggctgattattatattcttaatggtcgtagttgaaattacaaacgcgtttttactaaagttttattatcaaattaaggactataggattggagaatttgtcgaaattgtgtcggaattgagtataatcaaaaaattgctatacgacgatatcgcaactaacattatcacggagcgtaggaataaagaactctcatttatcttaataagattgtttttgtcatttcttaataaatcattatgcgtagtgtgcaataacttatcctttttcattttgataaagtattttgtaaaaacagttagaaacgcaaaagatatcacggaaattgatactgagggatttctgtcaacattttacattctcttcaggatcataaattcgatgtttctgttcccacatttcctcaaatctttcgctttgttctatgcatcgtataggagaattgctagttttttgaataaatgctcacccaatttttacatcagcgataacaagttcactggatccgctgagatgtcctatgaagtcccagctgtgactaaccagattgataaggacgttgttgtactatataaggacgcttcattttcatgggttaataacagaagtgaccttgccaacatgaataatgaggtttatctgaagaatgtgaactttcagcttaggagaggtgaaatcgcaataattacaggccctcacggttgtgggaaatctaacttcatcaaatcagttctcggtgagatgacattgattgatggttcaatggcagtagttcccctccacacatcaatgccaatattttacgcttcacaggaaatatggctacaacagggaaccatcagatcaaatataacctttggacacagattcgatgaagagatatataacgcagtaatcaaggcactagagcttgagtctgacatttcaatgtgggaagacaaagacctgagagttgtgtcggacaaagcacattctcttagttgcggtcagagagttagaatggaaatggctcgcgctatctatgcctatctcgtgttcagtaaagttaacaagcagtataacaatggagaatgctcgttcctgatgtgcctggattcacagttccatggattagatccctacgtatcgagaacagtattctacaacctcttcaattccgagtctggacttctggttaaggatgatctctccctcgtcatgtcatcctcactgctggtatttgataagtgtattagagcttcagacctggacaagttcccgaatatcccgatatacgaaatcagtgataaattcctcgtgttctattgctacttgtcggacgttttcagtgacaagaaaacagacatggaggttaaaaaggttccgtcctcaagtcacccgcaccgaatgaacttcttcaacaaggatatgatgaaactgtgctattcagatgctaataccaaggttggaagagcagcagtcacaaaattcaaatataaacagtcctttaacgaaatagttaaaaacgaataccaaggtcataaattcaacccatattctctttatttaaatgcagctaaattcacatttgcaatttttattatagtcatttttggctcgagccttatggataacgtcaagtttgtcatctctacaaacctctcggacttcattaataaaaactcaaaggagttcaaggaagggttcactgtagatttggagcaaatcaagtctagggccgactccactctaaggatcattaccacagttgtgtccttcatcatctcgtcatcacttgtatccagcgttctattcgcgatatcaagtatagttgcatcaagaaggattcatgaatattgcgtaagctctgttttcaagaacagttcaacgatcattaagataaagaagcaaatacaccaagttataacttacatttcagctgacatttacttcgttgatgagtatgtggcggaaatgatgtcaacggcacttttgtcaataatccagacctttgtgtcaatagggatactgttttacacaatgccgctgtcaattcccctgatcactctcgcaatagtgttagtgtttgagctgatcgtgtcgaaatatataatcgcagccacaaatattcaggtcgcaagactggaaacgatggcccacattaacacagactgtgaaaacgccatattatcgtcaccaatttacagaagcttcaagaaggagtgggaattggttaatgacattttcgagaacgtagattataaagctagatgcaggttcctaatcaggtgcatttcaacgtgggcctcagtgttgtttaactggatattttcaatcacaacagcactgttcctggcagtaatgataatatttgacaaatttacaaactatgaaatggtcgtcggttactttgggctaggtctgtcactgagcatgagcgcaattaaatctttcagcaactttaaattctgttttgcaaatttgcaggttttcctgtgctcagttaggaggtttcagctattcattcctccaggcaccaagtgtgtgtttgacaggttccataatattcacgaagaggaccttgtcgtcaattctgccaagcccaatttgcaaatagataaaaagaagttgttaagacggaggaaacatgagttcagagatacaaaccccaacatcttaaagaggctcttcttcagcccaaagatcaacgttatagatattggcaaatatctcccatctgaacactatggagtagtgttgaaggacgtctgcgtatacacaacttcacagatgaataatgaaggtattatcctgaacaatgtaacagcctcgggtcaaccctcacatatcattggtatcattggtagaacaggtgctggtaaaactactttattgtcagttctgcagaacactgttaggaatagaacgggtcaagtcctgttggatggtagagatttacaagagattcccaaaagtgtcatcaggcacattatcggtgttcttcctcaactaccatttgttttcaagggttggaccattcgtaggttcttagatcctaggaaattattcactgatgatgagattaaccaagccctggataactgtggtctcctcgagtttgttaatcgcctacctggtaacttaaagctggacactgttattatcaaggaatccttcaattttaataaactcaagtcagataatacaaacggtaagaaaatagttgatgacaggaaggagtttcgtgatgaagagtccttaacaatgggtgaaatacagccagaagatatcatgttatccataagtcagcttagaaccctctggtttgcaaagcttgtactacacaaaaatctatacagaatgataataattgatgagccgccttccgataacatttcaaacgaagatgatgaaaataatacaaattacattggtattccgatttatgaactgctggataagtatttcaaacattgtacctgctttgtaactgcacactacgccaacgtcctgaaatcttgcacatcagtctgggttatgcatcacggcaggctaatcaagagctgcagtgcctcagatgtatcaaaaaatgattcaatctcaaatatcatcgaagaaatggtcacaaagtactcaaacaactaacctcaatgcagtaccacaatcaactaatgtagtcccacgtaaatatctattaaatatgggttcaatgattagaaaataattaattaaattataataaataatttaaaatttaaaatataataaaaagggctgttgacacccaaaggtgttcccgggcggtcccccaccccagtactatccgggcctagcaccgcttgacttcggagttcggatgggatccggtatattcgatgcagtatggccaacagcaagagtaaatatatttactcattcatatacatttcaaacattcaaatgtcatattaaagtggagtttttatttagaaaattagagacattaaaattttaaatattttaatgagttagcgaatgaaaaacagagtataatgtagatgggatgttgagatacgggaaattcttcaaatgtgtaggcagaaatctaaaataagataaagaagaatatcggaaatgtgtaagcgtacaagatttgcaaatttaaagacggaattaaatcaagggtcagatttttaccaagtgaatttgttacgtatatttttatgtgcatcaatggggaattgtaattccattttattataatattattatcatggccaaagatgcaatcagtatcgtttgattcctcgtttgaaatatgtaccgttgatgatgatgagtattcctcgattgaaggtgaaaaacaaggacgaccctcaagcgcgcgaggccagctcttctgggaaagtcgactgtaccataaatcgtattttaccagagaaaccgataataataaattcaaatactatgatagcagcaacatatttatatttctgttgtttcaatgggttcgtaaatggtgtaggtttgtttccttggattacgtcaagccgtataaattacacccattgccagttaaagatcaaatcctctattggcagccgatcttctctaaacgtgtaagtgatgggatagtgaggctagaaacccgaaaatcaaagaagaagggaacgaaatcgaagccttacacgtcaatccttctgcgtgccctgttcctaactttcttcaagagaactttttttgggctctttggtatcgttgccgtaaatgtttttagtatgagtatcgcaattgtggttaacatttacctgaaaagattacatgaaaaaaagttcgattttacaaaatgtgcattatttgtacttgcaataacatccatgcaatttgtagacggattctgcttcgaccatctgttgttttacatgtatagacttgtccacattgtacattattgtgtgtcaatcactgttttccaacatggcctgtgttatagaagaaagttcttcaataacgtcaagggctccaatgttttaaacgtttgtaactcggtgctgcatagttgctcacctgagtccaaatgctccgaaaaccctttgtattgccctgccaggcgatttcaaaacagtgatattactccgaggatgttttcatttgaatttatcgactcctactacatttcgctcttcttcgactcgctaatttccgtaatccagttcctgacaaattgtatctacggctttcttctgattaaattttacatatccctaagaattttcctcctaaccatggcggttgtcctcttcattgcttcgactttactgctagaggttatcaacaccttcatattaaattacatctactcattcaaagattacagaatcacccagtgcagggacataatttgctccttctttatcatcgttaaaatgtcaatggagtcaatcgcacataatattataactgagaccagaaatgcagagctcagtttaattgttttaaggttgctactgtcatttgccaacaagattttcttcactttatctgtatcaatgatgtttttgttcattctcaacgacttcgtcgatgatttaaaaaaaacaaatgacataaccaaaatcaaatgtgtagatcttttgaccatgctttatattttattgaagattattttctcaatatcactattcccgtacggcgtgaagcagatgttcacatcaatcgtgtcactgaagaggatcggtgagtttattgttaactgctcgcccaacttttacatcagcgataacaagttcaccggctcaactgaaatggccaatgacgtggttaattccaccggccagcttgataaagatgtcgtcgtactatacaaaaacgcctcattcacgtgggtcaacagcaggaaggatcttcagaacttaaagtttcagccatatctaaaaaacattaacttccagctaaagagaggtgaaattgcaataattacaggccctcagggttgtggtaaatctaatttcatcaggtcagtgctcggtgagatgacactgattgatggttcaatggcagtagtacccctacacacatcaatgcctatattctttgcttcacaagaaatatggctacaacagggaaccatcaggtcaaacatcacctttggacacagattcgatgaagttttatacaaatctgttctaaaagctgttgagctggaaacagatatatcctcatgggatagaggtgatctcagggtggtttcgaattatgccttttgcctaagtggtggtcagagggttaggattgagatggctagagctatttatgcatatcttgtgttcagtaaggttaacaaggagtataccagaaatcagtgctcattcctgatgtgcctggattcaccgttccatggattggatccctacgtatcacggacagtgttcaacaacctgcttaacctgaagtcaggcctccttgtaaaagatgatttatcacttatcataacatcgtctttgttggaaattgaaaagtgcattaagacttcagaattaaacaagttcccaaagatccctatataccatatttacaacatgaccatgacattgtaccacgatctcaaggactactctgagatggtaaaagacgagtttggcagttccagttctcacctagatgctactcctagaactccagcagactatgaatctgactccaccttgttctcgttcacgcacttgattgaaaaggcgagcgcggacatcaatgaaagtgaaataaggcataacttaacaatcaacaactataatagaactgagtcgacaatctgctcaacgtcaaacagtggatttaagccttatggtatttacttttcagcggcaggcgctttctttatattcttcttatccctgacgtttgcggcgactatcatggataacctcaagttcatattcgcctcggagctggcagactacatcagggaacgtgttgagtttaaaggcacgcctcatgaaatgatgaatagatttgcagacattcagtctcacagtgacaaatccctaaaggcgattagtttatttacagtttgcgtaattggggtttgttctgcaggcaccatatttttagtcatttcttgcgtaaaatcatcccgtaaaatccacgagtactgtatcaattcgatctttacaaacagctccgcagtcgttaagataaagaggaagatcagccagctgataacgtatttgtcctcggacattttccaaattgatgaaagtatcggctacgccatgtccacggcactggtttcactggttgaatccttgattcacgttttaaccctgtgctacttgattcccttctcaactcccgtgattgttgttgtcgtttttgtgataattaagtttgttttcatccgctacgttaacgcctccaagaacctgcaactctcatcgctggagtccacggcacacatcaactcggtttgtgaaaacgccatttcaggttccgaagcccacaggtgttttaagaaggagtggaagtttatggatgatattattgagcacacagactactacatgcggtgtctgtttttgaacaagtctgtgctcaccaggtcatcaataatagccaagggtttattttccctgataaatcttgtcttgttaataccgttaataaggtttaagtttcacgaagttaaaattcaagttggtatttacggtttagccatttcactgagcatgattgtcagttacgcgtttactaactttatggtgtcctttggcaggctggaggttttaatgtgctccatgaagcgctttgaaagctttgttcctctaaataccaagtgccggtttgaaaagaagcgaaatgtcaggaaggaagatttcattgttaactactctaaggactcccttaactccatgatcaccaacgaatttaaatactacctttacaagagaagagttaacgagtataagaaaaagaattcctgcttttcactcaacactgttttaaatcctcctaaactggttattttggacattgcaacggtccttccaattactcacactggtttagagataaaaaagatgtatgttgatgcttccgagtctaattcccgggtccctaaccacatcttgaaggacataaacgcatctgcttccgcttctgacattattggtatcattggcaggactggatcgggtaagaccaccctgctttctgttattcaaaacactgtgggcaacaggaccggtcaagtcctgttggatggcaaggatctgaatgatattcctaggcacattttgggtcagattatcggtgttcttcctcaactaccatttgttttcaagggttggaccattcgtaggttcttggatcctaggaaattattcactgatgatgagattaaccaagccctggatagctgtggcctcctcgagtttgttaatcgcctacctggtaacctaaagctggacactgttattatcaaggaatccttcacgattactaaaaggaccgtaataaataaagagcctgaggtggccaaaaagagagccagtgcttacaggagatctctgactgttcatgaccttaagaattactacgctgatagtgatatgattctatccagtagtcagctcaggacactctcctttgctagactagttttatacaagaagttctacagaattatacttgttgatgagcccccgtctgaaaactgttcagatagtgacggtcaggagcaatcactggataaagaaattggtatcccgatttatgaacttctgaaggatcatttctgtcattgcacgacttttgtaactgcacatgatgcgaacgcgcttgttttatgtacctccgtgtgggttatgcacaacgggtacctaattcggatctgtgatagggaagatatatccctgaatgagtcaatctctaatataatcgaagaaagtgttaggagaaagagcttaaacaaatgaagtaaattataaaaatatttaaccaaatgcagtacactctaaatacgagtcaaattctcatgggaaaatccatttaatttctaatggtttaatcttatacatatttatcgatccatactatcaccagttttgtttgttatatccaattatatggtacatccctgttttactctgccaaatccatgatgttactctataccacattatttctctggacatccataatgtcattttatatgtttgatatatctctccgtttctcgactacttcgttgagtaaatatttggattcgtcaactagacatttgaaagtaatcggctcgttcagagcgaggacaaaaagtgatttcttagataatgtacaattaaccctgcttagagagccgacaaatcttgagtatattagccaccactccctggaagcacggtttatagttgaaatccagtgagcctaaaggaaataataagtgaaataacacacccgaatttgactgtgtcgctttcttctggaatgataggaatagtttaaagccttagcggcttttactgaagcaagttttaaacagcctttggttctgcctctaaaaccacgaaccacctggaaaacaatatccctaggaattttcattttcaaatgtgttaaaatcgcagcgcgattggaatatcagagaatattgtgaaattatacaaataaaatagaaaaacattttatattaaaataaaaaatgacaaatgtgcgattttaattttacaaactgaaattataaattatattcagctccaaaagtgaggttgaagaaaataaatatttcgaatcagattccaaatttatattcatattgacaatttttcaatattaatagtagtttatattttttataaatttgataattatgcagtttttaacagtcattatcagcatttgtattgaataatttgttaatatgtcgaaaaccaatgtaatttcactaattatataaatagatttatttccttaaccttagctttctgtagaaggaatataaagttaacagtgaactttcatccctcatggatgtaatgctcaacagcggagtcaaagttaaatcagccgcagaggtatattcttgaaatttaacaatttaataatgatattaataatttgatgtacctgatttaggtagggaaaagagcagttcaatttaccaggggtgatgagatatcaaagtggctaatgagtaacaaagaactcgtatataataaggtaatattaagattccttaacttttgatagtgtccaagcttttttcaaaactcaaaattggaggataacgacgatttagcaaattttgtcgataggctcattgaaaagggatttatgtatcgcgcccagtatcaaccagtatgttaatacactaaataacaaccttcagcttgaaggaacactggaaaagtccgaaaccggatcatgtttgtttaactaatccataaagttgagtatagacaagagaccgatgtggcctaagagattaatcagaactcaaaaacagagattcgatactgtaggattctacatcctctcatatgaagggagtcaaaagtggaattatctgaagttaagcggaataatcttcggaatcatcgtaactcactgtgtaaatagaatgtttaggcaatgtgtatgttccaagcatggccattgtacttaaaactctcaatgtggtacatttcagtagttctgctaacatttctggtaattttcttaatatttaattttatttagatggcctcaataatcctgagattgattctgtttttgattatgtggttctgcggatacgatttctggctctttccgaacctgttcgacgaagatctcggagttgtagactctttcaagccattatactcatttacttaccgaaaagataacctaacaatgatggcatgtagattactttgctcaatactaattggaggtaaaatatatacacttaaattattttagtttccgtgtatcaattggggaaaacgcatgacataaatgatatatacaaatttacgaagcagtcatttttggatgtactcgattggggtcaccagaagcttgcagctcgtatttaattaaatttttatcatctttagcacctgaggaagcttccttttacaagtcactcggagttgatctgtccaccgagttcaaggaaaaggacccggaagaacccacagaagaaggagaagaagatggtaagaacgtggaatattatgttatgtgtagattacaactgtttactgggctgtggtttcaaatctttggatgatttggtcaagaattgtatgactgattgcgagtgtatgagtgtaagtacagtgttttaatgtgaattcttagaatctgctggaaaatagttgtttgaagcactgtcctaatgagacagtagcatctttaactgaggttaaagtcgacatttgtaaaagatacaagaggaaacaaacagctttataatttcttaatctccatgtacatatgcatgtaaagtttacttgagtctacaggtgatccaaagtgttttttatacaactgactttattattattaaaatggttaaattgctaatttatgattacgtcacctctgtggttggaaataaaataacacttgaagttgaaggcaatgaaaagatttcagcaatcattgacttaattctgccgaaaattggtgagaatataaaaaattcaaccgaagaaaaaactaaaaattctaaaaattctaaaaattcttcgggtgctgaaaaacctgaatcactgatattatatctgggaactacaattctagagaacaatcaaactttggaccattacaatgtgtcatccctaactgagctttcactgtgtttgtacatgaaagttgatgttaaggttacagtgacggtgttgaatggtatttttatcaatttataaatttatttaggaataaattgttttgggattaaatacactcctctggtctcaattcttatcagaagtaagattaaattcaccatgatagaccaacaaacaatattcgaaattaaaaagaaaatactttccgcatgtaaattcacaaatacaaaagggtatcccatataccatttattattatacactttgtatagttgtatgagtactacacttcatgtacacacaccatactatacacacatactttactttatatactacatactgtatacataactatgctttatatactacatactatatactgtaagctatttacactgtgtatatatgtttagagaagaattagcattggagaagttgtgtttatattacaaaactgcagagttgaatgacaatttaagctcaattaatgagttaaactgtaaaaacaagctcagactaaagttggtaataccctatggatacaaattcaagaaattgcaaactaactcaacttgtcactcatcttccctggtgtcacctaaaaaggagtagttaataataaactaacgtagctcttccttgtcgaagatgaatttcttaaacaattcaagaatcaactttagccaatacgcgttcataatctgatcaattttatattcatgttacttaccgttagaattacaattgatatcgggcagatgataccgccgggaaagtcccacaggtactttatagtcccgccagagtattcgaaattgtcaaaattaaccaacagagggtaagcaatgtatctcaagagcaatacgaatctagccacaaaatgtaagagaccataagttacaaagcaaagagataatataagttcattcctattcgtaaagtaacaatacgtcttgcttaagtataggaaaacgtcgggaatgtcgtggaggaatatgataatctgaaggggaattaaattatattaaaataccagcgagatcctgtggaagttgtaaatgtaagataggatgagtagagttgtggttgtgatgtggtgaaaggtcatgatgttggtgtcagatcttctagtctcccatctgatgaaaatcagacatgaaatccaaaatccagtgcacataagtaggaaaattcgagtttccatatttatgtgcaactcaggccatgcagctattttatttgtcacctgatgtatatcctcagcaaagaacctgaataaccattaaatttataatgacgtaccaaatccccttcaaatccttcatgaagtaactaacccagcctggatttttagcagttccatactcttttaataataatttaaacgtatacaaacatgatgacgtatgccatataaagtacctagtcagcacattaacaattaaatattggtatattaaatgtgtaataatatattaaatatgtaataataaattaaatatgtaataatatattaaatatgtaataatatattaaatatgtagtagtattatataatttactaatactatgtcaactaaataatgttatgaggagattaccacatcgattctgacattttgctgacttttttcttgggtccgagtttatatttggtgatcaaggatctgaaaactgcaggacacttggttgtatagcacgagtcacatcctgagaagatgatcctcaacactgaaagtaacacaataaagaacaaaacgatgtatttatcactcttgtttacatgaggcattacgcctttgaaaacaaaaatattgttatcctcgtattctatcatcttctaatacttaaaatttataaagattcgtgataaatttcaagattaagttttaaataaatgttgaaagggtaactcttagatctaataattattcgggtataaaactaggggatctaatattgtaaacgttttttaatgatacacataaactaaaatatagaattctgcgtttaattacaaatattgagatgatgaaatttattaaaatacgacaatctttgaatattacaaatacaaatgatatatactaataatacaactataaatgatcgtttataatatatatttaattaaaatatccgttggtgtataaattattaacattagtgtacagatgaatacgtgtaattttaaaaaagttgcaaagcgggtaaaaaacaggtcatttgaccaattacaagatcactacaattataaatattaaaaataaaaaaatataaaagaatcttaatgagtatttattgacgttgtggtgtactacatttaaataattagagaattatttggaagaagcttccttcagatacgctattaaatctgctcggtcttgttccttctttaacccggcgaaaaccatttttgttcctggaatatactgcttgggattaaccaggtacacaaaaagatgcttatcagaccatacaatgcctaatttaatattttacactaatattaaaattaccagaatttttatttgcgtcagaatatgcgtaatcacttgcgccagatttacggccataaaatccatataggttagggccttgtttcacgcttcctcctgaacattaaatttatattatttttacacttatttagtaatttatagttatacctttgtttattgtgtgacattgagcacattttgacttgaagagtttggctccttttgaggaatctccttcaggaataactacatctggttccggttttgccatagtaaattaaacaaaacaaaggaatttgacaagataacaaaaatgaaattaataattttgtaaattaattaaatattaagtgttgaggaaatggataaaattgttgagatttgtgaattaataaattttataattaacaaagagttgaatattggaaaaataactttaattatatttaacaggacaaaaaataaattttattataattacaaaaatactgtacaattgtaataataatttgtttcattagagattgggtagatggtgcataattacttactttcgtacattagcaatgatattctgaaaatcgttatataactaaaattgatatatttaactcatgagttaatgtgtatttatttttttaactttgttttttacaagatttttattatatttgtattattatgttgtagtatttttattcctaaagttacccttttaaagcagaattttcacatatttaactttgctaaatgtataagaatttactccgagccaaatggagtcctacgggacattctaaacaaaccttccctaacacacaactttttacacagattcgcaattttttcttcttctccagttaatcgcagaaattacactaatcccaagaataataacaattgttactcatttgtaccatataatactttaaattctactaataaattgccttttccatcatttaacaaaattgagctcagacctatagaatacactaaaaatgattccgaattatctcatagtaggaacactttcagtcgtgtttatctgttagaatctattaagaattggtttttagatgaagtggtaggatggtatgttcctcctatgcccatcggcgaaaaagcttcatacatcctcaaaaaagaaggccctctacaatctggtatcccattactacaccaattactacattatttaatataagatttagtgtaatattaaccctattgaatgttttagatgaggataggaaggcattgttggataagattggtgcgactgaggatgattctgtctacacagtttttaataaatacagaaacttcataaagaacaagcctaagatttcatatactgatttaaatgattattttctcggatatgtaagacgagcatttgtggaggatttggagaagatggagcgtgccgcttctcagggcttgaagtcctggactgaatattggagaccaaacaggttattacacacatctaactattaaacaaatttagtaaacgcaataaaattttttaggaaggagaaacctgtttttgatgacgattctgtgctttcagttcaagataaaagctttctaacctggtttgttcccgccaaagaggctgaacaacgtctaacacagctacaaaaaaagaggagacgttatttcggcattaataccaggagattccgtggactcatcagaatcacaaagtacacaaacttatcctatctacttatatttactacgtaatttatttgactacttaatttatttgactacgtaatttatttgactaagtaacttataactattcacagtgttaatgtttggttagggactttaagagtcgattaacaaagtgttctacgacgatgattccgttatttttactgggattagtgcctaaactgggctcctggtccataggaatttcctccattgtcgccgctaaaatcatctacggagatagaaaaaactatagaacacaggtaaaacctttgggcatataattttatagtttttggacactgaaaagtatttgttaaagtcagaatacgaccgttctgagactgtaaaaacactagcaacactttttatcgtggccttgcacacaacaatcggatatgtaacctcaactctagtaaatttttacgtaagtttgttctaaataagaagtttcagacgaggattggaagtattttatcacctgagactattaacgccttttttattaatttgcaactcacgttatgctcactgatttatgatacaagtgaaatgacatttgaagaaaaagttaagcttgcaaatggtactttaggattagaacaaccagaatcacagtccaatccgccaagttctgagtaatctattccaccacaaattttctaatatattttactaaattttaaataaattaattgaataaatatttgttgatttatttaattaaatttgattaatttgtgagaataaaattttctggagtattctaccactgttggcagttgtgaggtgatatttcagccctcaacagggtaaaattggtgatttatgcagttaaaaaattaaaatgtatgaaaatgttgaaaatctcaaaattgtgataaatgtaatagggaattgagaaattgtgggaacttcgtaagtgacatttaaaaaacgttcattatataattatgtcatgatttttttaccagaggttttgaagattttaatactccgtctgtttcagtagtttcagaatatatatttttaaatacacttgctctatactcctgccgtaacggaattacgtttaatattcactcacaccttttcgcactttgtacatttgtcaattaacatttttaaaacacgaatttagcccaggttaatgagggacgactgtgaaaaacctccaaactctcatgaaggctctgctgatgacgtttccaactcatccaacgactccctttcacattcccctggatcttctgatcaggatcaactcaaggataataatttgacccaggaacaatccgaacaattacctcttaacaccaattccaacaacagtaaccactcctctaaccttaaatccaatatttcaaacagttccaacaagaactttaccagtcccagtactacaaattcaaatcccaatgtaccatccaattcaaaatccagtaatccccaatctaccgtacagtccagtcccatccagtctaatgtacaatcttctcaatctacagtacaatcttctcaattgactggattgaactcgaatcaatatttaaatggtactcgtaatggatcggtgaatggtcaatcatccaatgataagagggagcaggcattacaggatgaggcgacgaggttattttgtgagatggcttcagatcccgacataatggaccaggcttttagtgcggctgtgaaccctaacgttgctaaggaacttgctcgtcaggctgacacagcttggaggaacattgagactctccctggcggtttcagagctttatgtcagatgcatcataaccttcagcagccgctttggaacgcagtgataggccaggatttaccgaaggtatcaaattaccaaaactcaaatcttaatactacacttcctaatgaacccataagggccgatccaatgccaaatccttggaaaactgaggcgcccagacctgcaagttccgtcccttcagcttctgtgaacgggtttaacccgtttggattttctaactttgataatatttcttacccgagatcgcctcagggttctcgcgacgagttactctcctcggtcatttctcgcacgcgttccgccagcttccaaaccgcttctcaactaatccaaaactcctccactaaatactccaaggagatggaggaactcgctgagatgggcatcactgaccgtgaaaagtgtctaacagcccttgaagctgctgacggcgacctgttccaagcgctcggcatactacagaacctagacgaaatggaccaagaagaaaacaataacaataattaatctcactaaattatttttagtacgtgtatattactatacaaagtatatagtagtttaacagtgtgtatatcagctattatacaaagtgtatagtagtgtaatagtgtgtatggtaactattataccaagtatagtacagtatgaaaagaatattaaatgtatgtttgaaaattaatcatcctcgggtcgatttgagagcatggatgtgaattcgtcgtaacttatcgttccgtcacggtccaaatccacctaaatgaaatatcaacattggttaaacattaacattgattaaacattaacatccactgtgaataatattcaggaaagttcaataagttcaatgagtgaattacctcttctaaaatatcttcgaccatttcttgtgtcatgcgaggattggtagattcagttgaaaaaacgcggtacatatcctccctaataaattttcagcgatatcaaattaccttgttattcttccgtcacggtcagtgtcaaaaatgttaaacgccctcttgaaaaaatccttctggttatacaaacgcgcatctatcgccgccgccacaaattccgtgtactctaatcgattttaatattcatatatttattataaatattatatagctatatagttattatagttaataatatagttaatatagttaattaaatagttagaataggataaagaataataatagaggaggttaacaatacctatgattccggattgatcggtatcgattcctttgacgatttgttcgatgtggaatgaggattgtttggagtgtttgagtccgttggcgacttcgtcgagtgacaagacgccatctccgtccttatccagtgattcaaaggcgttggtaagaggtgcaagttcccgttcactaagatgatacgccaggcaggtaagtgccatttgtttcatcttattatatttaagaaacttcttaaaacgtcttgttaggcttttggatatgtgcggctctactgactgtggaattgttctgattctgagaatccactcatgattcagagcttcctcggcagttattctgttctttggaatgtagtgcaaacaccttttaataaggtcaattgcagattttgacacgtggctccagtgtttctccacaaactttagagttccccgtttgacattgttgagaatttcagtgttattgcttccgtggaatggcgggtatccgaccagtaaaatgaagagaataacgccggcgctccagatatcacacgccttgtcgtagttacccagtaaaacctccggtgccacgtagtatggagttcccaccaaactactgaacttgtgtgtcctgtagcactttgtggcaaacccccagtcaatgatcttgatggtggaggagggtttgtcgttcatgtataaaatattctcaggcttcaagtccctgtgcaatacgttcctgttatggcagtaggcgattgctgaaaacacttgtctcattatcgaggctgcgtacgcctcagaaaacccattcgtactcacgatcctgtcaaacaactcgccacccacacacatctccatcaccaaatataaacaatccgcatcctcgtacacctcaaataactttattatattcgggtgatccaacgttttcctataaaaatattatacacaatttttcaccaattcaccacaatgacatactaactactcagtagtaataacaaaaatagtatgtggtatagtaataactacgcaatagtaataactactcaatagtatgtggtatagtaataactacgcaatagtaataactactcaatagtatgtggtatagtaataactacggaatggtatgtgtagaagtaaaaaagtgaaatatgtgttacatgatttgtatttctcgtttcattctcatggcgttttcgattttggatttgagtatgattttgatggctctgacggctccggactctttatgtactcccttgagtacattcccgtagctgccgttgccgagtttctcagacttgatttcgtacacgtcgtggatgcttgtgccgtcagttaaagcggtttgaggtatgatcttggacctgtttaaaagcggagacttctcacggggcttcccctcatttcctctggtgggaagttgaagtatcatgcccttgaagcccttggggattttatcctccttgtgcatgcactttgtacacaaggagttgtaactcggcttctctatcaactccttctcaggcctcggacttatcctaaaacacggaggaatacacgtcaccttatgctcatgaatactcatgtccacttctctatgtacacccgtcttgtgcacaactctgtgcatatgctcttctctattttccctattttccctgtgtacatctctctgtacatcaacttgacgtagattaggttgatcatgtcttgtaggagttaaattatgtgcttcctcagcaaatctaacaccttgtgtaaattgtgtaggttgcgtggtttgtgtgggtacccttgtaccatgagtgtgcaccatttcctgaacatgagtttgtaccatttcctgatcatgtgtgtcagtttctctacgtgttgaaacatcatcggagaagttagtgcttgaggttctggagctaagagcgtccaggttcatctggtccaatttctcattctttggagtttgtgggtgggtctcagaatcctcagaaatgctctggcagtgagaaactgagggcgtgagtgttctcttaaaattggtaataatgtcagaacccattctggtaatggttttaaacctgtcagaccttgaggttaccattgaaatatcttcaaaactcacgctcttgattgaggcaagcttctcgaagctggagaccaaatcctcatcaaaccctgatgaaggcgtccagcgaaataagggaaaaaactcatcctgtggttcattttctgtatgttttaccggtgcagcatttggttcggtaaagtttagttgtttttttggctcggtaggttgtgcccgcttagcggccttgtcattcttggtctttaaattaaatctattctttgaaaaaaatcgaaaattattgttggaggagacggagacttccttccgtttcacgttctggctcatgttatcctgttcctgtccaatgctgttagaattcagagtttcaactatgtaattcctttcccttctatttaaattcgattggacaacacccatagttgtcgtatttcataggattccaattaaaatattaaaaaattaaaaatttaaaccttaaatatatatctaaaattcattttccatctacactaaaatatcaaatttaaaaataaactggaagaatttcgattcaacatgattacaaatcgggaatgtgaagaggaaagcaaatttcggatatacaaaatatttcacttcaaataaaggtttaaatgttatgtcactcaatctcagatctgacaagattcaacgtcaaattattggggttatcaagaattatcaacaactctcagtcaactttaataaatttcctctagataaatttaacaaattattttatcctgtgaataattgatttggcactttattccttgtgttatcctgtaaaataagttattctctgtttgtgttgtgttggtattagaattccatcaattaagcttgactccttgagtaaattccaaattttaaatattaagttaatataatttcataacatccgtttaataagctgttataaccagaaatgtgctcactgggcttggattccgtaatttatgacttcgattatatttcctgcgtaaaattttaaaattatatttctattatggaaaaaataattttaattattttagcagttcacgtcgtgttccgtaagtgctgttctttctctgtactcatttggcctcggcctggaactatatcaaaatcgaatactcccaaataagcacaaaaataagttcctcaactcatttttactgtgtatttcacatgtgtttggtgaatttggccattttaggaaataattccatggaatttgcactgctccatgtgtaaactaaactcacctacaaaaacaataattctgttttttaatccttagaatcatagatttaatctaaaatactaaatttatcaattatttcaagtttaaatttatatattaagtgatatatcgggtcacgccactctatataacataattccatgaattaatttttctaaaatatatttaaaaaatgtattaatatttttatttactgtgtaacatatttaatgtatgaaaatgaagtcgaatttacaggaggaagtgactgaaaagtcaccatctccctgtggagatgatgccgtggtagttaattctttggaagattctgtagtggaggaatcgtatgtgttattggattttccagaattccactcgacgacaattttcaacgactcgaagtttgaacttttgtcagaggataaggaacaagggtcactgtttaaaatttcaaattgtagttttgataccataagactaaataaatttgatactgagaaaccttcctgtgtaattaacgaatatttacccttgaacgggagtaacattttaaacggaatgacttatatacttgtaaataaggaccagttgaacggggaaacagagtctaacaagggtttaaaggcccagattgaagataattctgacgtctggtacacaagcaaatgtatagaattcagtactgatcagtaataaaatattaatttgacatttcaaatattttattttatatataaaattttgatatatttaaattaacaacttttatacaattattattatataattattattaaataaatttataaaattcaatgaaatttaatgaaattccggtgtaaaaataaagttaagagcttgtgtatgtgaaatgtgctgataaaaatgagtaaaatccgatggttcgaaatataaaataaaaaaataaataaatttaataataaaatcaatagagaatgagaaaaggtgaatgagtgaaaaatttaaattagagaggaatggttccccattgctgtgagtagagttagtatggtttatatgtattttctcacatgtctggttttaatttgagattggtaatttgttaagggttgaaatttgtatgatggtctgtgggacgagatcattgacttttgtatatatttacgatgtcatcgagtaagaaaaggtatatacatgaaggctggatacacaaatggacgaattttattggtagctggagaccaaggtaatttcacacctcctctcacctgttttcagatatttcatgcttgaaccagattgcttatcctattctatcgaaaaggacggcgttgtaaaagaatcattcctattatctcactgcaaaatacgtttatgcccaggtttcacatactcacacttatctcacacacttctccacacactacacagtttataccattataccactttgttaataccataataatactatattaatactttagtactgtaatattaccatattaatactataataatactgtaatactataataatagtgtatatattgttaaatagtgtgaattgtgtgttagacgacccggtacgtttggatattgaggtagtgggtagttgtttattgtgtttgaggacggacacgcccttagaaaaacacaagtggtacgtgtcatttaagcgcgcgcaaaagctagcgcttcagtcaaaccagcgacgacagcctggtgaacgctttctaacttcacaccctgaagaaactagggctccagaatcggaacctcaagatagttcaaaatactcagaaaaatatactgaaaaatatactgaagtatatactgaagtaaatactgaagtaaatactgagcggaaatatttgtcggagagtggtagagtgaaggagtttgagccggtggttacggataagcctgagatatcaaatatatttgtgaagacgagatctggccgtgaagcgaaaccttcgttatcttacattttggacaatactgagacttttgagcacatttcttctaaaatccttaacgaacttgagacaacgacggattctgagtcactaaagcatctcaagacttttaggctaattctgtcagacttttgctgttccatcaaacgactctccgaagaggaattcagcaccgctgaaaccaaacaaccgtactacacttctaaatctgacaaggcatactctaaacctgagtacaccaagactgacctcactaaatccaaatctaaggctgagaaatttaagtctgagaaatttaagtctgaggagtattatttatccaagaatttaggccttgacggtacaaagccgctcagtgtcccagttccaaacgtacacaatctattctctgaacccaaaactcccgaacaaaaccacttccaccaactcgaacaattaaatcaattggatcaaatagatcgattggaacaattaaatcgattggatcagcaggatgaggacgggagatatgtgtcagaggagaaattggttccgaaagaggctcaggatttgcctgaggctctggaggagtctgatacttcagaggagttaattgacccgaacaagggcgcaaatatgcttgattatcatgaattcacactgggaactggttgcgatgatcctacagcgctactcctagctggaaaggctgaatcctcagataatttctcattcgaatccaaagtctcagaatttcccgtcagacggacatccggcgagtcagattctgactctgaaactaaaactaaattagaatcaaagttggataccaaattttacgaaactgcatcaacagagtcctcattgtccaaactctcactcaatactttctccaacaccgacagatccaaaatcaaacgtagaaccgttctacccaaaccacgcctagaccataaagttcccacctctcaattatttacacagttatttacatagttatttacatagttatttacatagttatttacacagttatttacatagttatttacacagttatttacacagttatttacacagttatttacatagttatttacatagttatttacatagttatttacatagttatttacacagttatttacacagttatttacacagttatttacatagttatttacacagttatttacatagttatttacacagttatttacatagttatttacacagttatttacacagttatttacacagttacgatgtgtttaacggtataataacgtgtaggtatcgatatggtcgatattgaaggattttatagggaaggatttatcccgtataagaatgccgatagtgtttaacgagccgacatcgaatttacagcgtgcagctgaggattttacgtattataaaatcctgaacgacgctgcggatatggaagatcccattgaacgacttgccaatgttaccgtctacagtatcacgccatactcctcagccgttggaagatcatacaaaccattcaaccccctactcggggaaacatacgaaatctcacacacaggattcaactatttcgcagaacaagtaatacatctcaatattcacatagtcaactttcatagtcaatattgagtcaactttattcacatagtcaatagtaatagagttaatattcatagttattagttggtggtggtataatttgtgggttaggtggcgcatcatcctccgatattggcgtttcattgttttaatgataaatttgagtcctcgggaagcctcaacatggtcatcaacttcaccggaaaagccatcgaagtatacacattactacacatttaatatagttaatagtatagttaacagtatagttaatatagttaatagttaataatatagttggtgtaataatgttatgaatgtgtataggctaatttgatgggtccgtttgtggtggatttgaagttgggttctggtgttgagaagtataatcttcagaggtgtaatatgatattacataatttaatttttggtaaaatgtggattgaagccgtcggatacgtcatcatcaaaaacgtcaccgaaggacacttctccgtcatgcaatacctcaaaaaaggatggtaacacataacatactatttattacattgttaattatactatttattacattaagtatactatttactatactatttactatatagttaattatatagttaagtaataatagagtataataaataatgtatgagtataggtttaataaggagatacacaaggtgagaggtttggtgttggacaagtatggcacgcatcattattacatatctggaatctggagtaaacacatcttcatcgaaaaagtctactcctccgcatccaaaagcaaaaacaaactactcaatgacgacggctcactcatcttcaacaaagtttcatcattttttactattcactatttactattactattcactatttactataccatacttactattactatatactatttactataccatacttactattactatatactatttactataccatacttactattactatatactattactatatactatatactattagtatatacaattaaagttataatgtgtagtaccgatataagaatgaggcggatgcttgggatgcgtttgtgaatgatatagactgggagaatataaatgtggtcccgaatacgcgtagagaggtgtggaagccatttgaccgtccagacaataacgaggattactacggatttggttacctcaccatgcaactgaatgaacttactgaggactatgacaagtctaagggagcgcaaatgcccagaaccgattccagatacagaccagaccaaagattatacgaagaggggaatctcgaagaagccaccgaactcaaaaagaaactggaagataaacaaaggtactttccataattactagtattttcttcactttgatattttactttatttacgttagtttgatttttcgggaattgctgtgtaatttgtgttttagagctgtggcgaaagatcgtatggataatcatataacgtataagccatactggtttaccaaggttattgatcccgctacacatcaagccaactgggtctacaacgtatcttccacacttttacacattttattcatattaattttacacatttattaatttttcaagttattcacatattaatttttcaagttattttattttacgttaatatgtttttagggtacgtattgggatagaaaacgtgatgggtccgtggatcagggaacacctgatatcttcggactataacataatttactcactaaattattaatcttatttttatttctatctttaattttttgttaatttttgttaattgttgttgatttctgcaatttgtgtagattttgtggattttgaaaaatgtgtaggaatctgtgatgttgtgttggatggtgagattagaaatttttaaaaaatggacaagatggaatatgatttggagacgtataaaaatttaataaggtcgaaattgtacaattatactgcgaaattatcgtatctttctcacgacgacgagtggatccgggataaaatccagcacttgtcagaaatcatccagagagcagtggaaacatgtgaaaatttaataattctagtccgagggcagccttcctcgggaaaaacgtacctggtccgaagagctctgtccacagtcctctcctcaaaaaaactaattaaccagtccacacacgtcatagaactctatgcctatgaccacgtggatgatattaagtgcatgaaggaacttcttaacaggcttgagcgagttctgggatccaacacgggggctgagaaacacatgttagtgtctaatatcagggctcggatcctgcacgcgcttaaacttttaagaagaagtaacgtctacgtcatcatagtaattgacggatttgagattttcaccaagggcaactacgactgcagcagtactgtgggctcagtgtccaggagacagggtctattatactttttatcagactccatgcagactaaggggaccgcattttccatcatctttgtcacttccgacctgaactgtattgacaggatggagaagagagttaagtctagatttgtatatgaacccgtctactgtttcagcgactacgacgtcacagactacttcgactcacacggagaatccaagaagatcctacccaactgcatcgtcaaagcagataaagacaacatcgtaattaccatataactatctaacacccattaccaatactattactaatactattagttatactattagttatactattagttatactattagttatactattagttatactattagttatattattagcagtattattagtaatagttattacgtagtggaaattagtgtatatagagtatgatgatacaagacagtgtgtgtgggagggacaggaatcacatatcaatagaggcgtgtgtatcgattttaatgttaaagaagacagaattcaagatcaaacgcgagaaaaataaaaatcttgtacacatcacaatacgtaaggtattactctatgcactaacaccaattatctccagttaacatactacttatctccagttttattctagtaaacttgataatgtaaattggtaggagctaaaagtggacagaataatatttgagaatttgaccattccgcagcatttcatactggtggcactgtcgagattacatgtcaagggcgtttacccgcagaccttacttgagattatcaaggatttagatgacatggtagccttcttccctgccgaaaaaaacgccattccaaacaccaccgtattctccatttagccaatagttgttaattttaaccagttgtctacagatgatagttgtctacagatgatagttatttacagttgatagatatttacagttgatagatatttacagttgatagttatctacagttgatagttgttaatgttaagaggattaatgtgttttagggtttgaggcgtgtgtttttggagttggtgcacatgggactggttgagtgggttaactattcggagaataaaattgataatgtcaaggtgcaacatctggtcaatgacccctcaggaagcacaatcccctgcagattccccaaataccgagagtatctccactccacacactagttaaacatgttacacactagttaaacatgttacaatgtgttgattttgtgtaggtacatgagattggagttgacggagttgattccgacgtacttgtcccagtggctactaatggccgaggccaccttttaacacttttaattttttgtatctgttacataatatttacctaacaattggttacacttggttacgcatggttacacaacacattggtatagaatttgttacagagaataaagtatgaatatagttggtagaggcgaggaggtgagtaaatctgtgattttgagtatattaaatggttcaatagagagatataaattattagaagattcaggggataaaaggcaagattctggaatattcgaaaaaaggaagaaaaaaccaaaggatgaaaaggttaacaaaaatgatttatggaatttgaaggttagtgatctcaatgaattctccattaaaaaatcagattcctacgaaaactcgacaaatcaactcaaattcctagaatccgtcaaatactacatcacacataatctcccctaaaatctcaaacatctaaccataatttagcatgaatttcataatttcccctaaaatctcacataatttaacataatttaaccaataataacataaattttcataatttaacatattttagcatgtatgatggtataagattagttatgtgtgtgtacgagagtccatgttttaatttctggcggtttggtttttggcggttcaacttgtttaacgtggctgtaacgggtcagattagcccatttatccttcagttgcatgggagactttgtgcctaaaaagtaagccctggtaataaaggaccagttcccaatcccatgcctgttaatggccgtcaccaaaatatcaacttcgtcatccgaccatcgggtgtatctcttcttcctattttcttcctgagtagttggagtagttttacttagtgcttgattgggtctgtagggggtttccttgaggttagaagagagtctgagataataaagagaatttagcagttttaaatgtaagatacggccgaatgaaaggtttgtaaatgaatattttgatagtttggggagtactgtggcgcaatgagttgtgtgtttgaggaactgactgctgagtagaatcggctcatttcccaatttacagtagaaactggccagagtacaaagctctgaaatccactcggaaaccttatcatcaagcagaaaattaaggtctgaaaactccgaaatctcaactaaatcatactccaaactccggtcggcctgactacccgttggtactgaacaaattttaccataaaatgaagtaattttaccataaaatgaagtaatttcacctctggccgttggtaattctgacatatcctcggctaattggtgtgattgctccaatggatcctgctgacgcgaggtatgttcaaccttttcctgagttcccacagtgtcagtgcacacaggatttgaaccatacatgtcttgagtctctattaacacatcttgagtatccatatttattgacatatcccgggtctccattaacacatcttgattctctatatctgtggtatcatcaaatttaccgattgttagcttgggctgtgaagtataaaattgtgtggtttcggttttgcaagtgttataaattgagtttctacattggttacaattttcattaagcgttttcagcagttctttggtgtttagttgtttataatttttctcatttgggtcatagaatttcatcttctcctggaacacgtgagattgactccgggtaaagaatttgtagagatgattttggcatagataaacgccctcaactaggattaaaagtaactctaaaagtgtggaattagctctatagtggtgtagtagccgccgcaaatttctcaacagtacaaccagcaggaaaagtgatatataaaaatattgaccttgtttttgtgataaaaggtgtaacgaactttcatatgagcggatgtagttgagcattgacgtgatcgccttgtcgtcgtcgatgtaaccgccacgacgtgtagagcccacagtgggatgtactgagaataattttatcacgtaattctcaaactgtgagaatatttcatcaaatcgctcagaatttacgaataaatctaacccactgaagaagctcaagtaactgtgtttctgacagtttaatccgttaaaataacataatttgggattaaacggtaaatttttcaacgaattcgcacttaattttggcgttttagtgtcagatttcgggtcattttgaggggattttgacccagaatttgggaccttaagttctctcggacttgatctttgaattttataactcaatttactgtttttagtagttaatttagtgtcctcaggacttagttgtgatgatttaggatccgattttgcagatttagaatcgaatttatcatatttaggatcgaatttcgcagatttagaatcagatttattgagtgggtttgttaaattttgtgtgttggattgtgtgttaaaatcagttctagcggttgtaggttcggatttacaagatttcgaggagttataagatttctgtgaaatatttttaaagtacttgccctgaactaacagagcgtaggagatgaaatcagcctttaaaagctgtaaagaagcgttcgtcacagctgaatatgaaaccgatctcgaactaactctcgaagtttcacctaacaactccttctgtgatctcgtcgaatccctccgagaacttctcaattctctctgagaacccaaatctctctgtcccgttgtatctttccgtgccgttgtatctttttgtgttgtgttataatgttgtgaagtagagtccattttagttaaaattttagagtttgtgtagattcgactttggaagacaaaaattaaaatgttaatcaggtcaagttaaaagtaaattggactttaaaatcgcgttaaaaaaataacttgtcattggaatttcaagttattaaagaaaataagattgtgtaaaaaatactcaagatttaacattcctaaacactacacatggatttacgtaatttaatccaactttcacaattttagttaaattatcatttacattaaataaactattgaatttttatcaattatttgtaaaaatgaagtttttaatttttacacatttcaacccttacacatacaactttacacatttaaactttacactagtgactgtataatacactagaatactttaacactacaatagtatactacaatagtaagctaaaatggtatagtgagagaatatgagagaatattactgcgtttgataatgtgttaggaattgatcgattttgagtgagacgttctgtttgtacttgtccagaatgtcttttaccagttcctggtgctctggtttcagttttgatttgtactttacactcatgtagtccacccatgacttaccactctcacgctcactcgagatctcccgcaacaccaaaaccactacaacattatacccataacacacggattagaattaactaaataatagtattaccttggtatttggagagctgagagtcgtccggagcgtctgctccgacaccggtgtccacttgaatgttgagattaacgttacaggagaaatcaaagaggtatcgcctggtgccacggatgaacgcgatttgagcatcaccctccagagcctccaccgacgaaggcctcacactactacgacacatcaaacccgccaacttctgcaacttacacaaaccattcccatccatctccaaatttatctgtaacactttcaacccataattattatattgtttaactcagtaatataactcagtataactcagtagtaaaattgatacgtcattgaacatttgtagtatgttttgtgaggcgtctggtggtgtgggttcattttggtaagaggattccagtagaaattgttccagggttttcttacaccattgcgtcatatctgatgaatttagttttagtgttaggtacctttttcctcatacgtcgtaccctgggaattccaggacgatattgctctcttcgattggtctcccaactgttaacacaattattcactatttgtgtacataattatgtagtatttgtgtacataattatttactatttactgtgtaaataagtaagtagtgagtaactgtgagatacgttggaattgggggtgagtgattgtggagtgagtgtgttggcttgtagattagtgttgttaattttttccccgaaatagcaatagcctacagcgtattgaacgtgtgttaaatacccattttctttgtttcgttgatgatcttctcatcttcctcgtcgaaatcaggcgtctcatctgattttttagccgtttcaccctcagccttggcttttttagctctctcagcctctttcttagcagactccaactcttcatacctttcccaagcctcatagtccatctcagcctctcccttctctacattattttaacagttaatatagtaaattagtactaaataagtaatatagtaaattagtagtaaataagtagtagtagtgaatatttagaagatgaatgagggtgtgataccgcgttgtgaggtgagatattcttggtatttctgttgttttttatcctgcatttcccgttgcctgtcatcgtataatcctccaaccttgtcaaataagccgccaaacacctaaaaatcatatcttaccactataatacgataactaagggtgattgggtaagtcagggttaactaagttatggtggtagaatacttttttctgtaattgattggcttgtttgagtttgaggttgattttgcgtagaagattattgacgttggggtcggatttgtcaatttcaaggagataattacagtcctccaaggcctcctcaaacaaaccaatattaaacaacgcctgagcccttctatagtacgcctaatcatatttacacagttgtatcagttaagtaacagagttttctagtgataattagtgaaaatgggctaagttgtgtactttgatgttatttttattgtttgagatggcgtcgtttgcggcttctcgggctttggagtagttggataattcgaggtatgtggcacataagttactgtataagacacttaacagctccctgtgagaaggctcgaaatcactcatcttcttcatccaactcacgccactctaaaaaaataatttataaataaatttagggagtaagtctatggttacattgtaggaatctgaggcttcttggaatttggcgagtttgtagaattcgttaccggctgatttgaaggcggttgcctttgagaggcactcttccacagaggcgggagacgccaaattctcatccaattcatccggactatcaaaatccttttcagacattttactaaaaaataaatttaatcgtaaccagaagaatttaataaaattttttttctaaatttcacaactgatatggtgtccatagaactgagaataaattttaaatttactaaaatttcaatattttcacttttttaatttttttcatttatttttttcaaatgtgaagatttttttcaattatcactcagttttacatctacacatttttttcctgtacaatatttcaaactaatcttaatgccagtaaattcactgaatatgccaactaatcctcagtaaactcaccctaaatgtgtaccaatttctcatttaatgtgtaccaaaatattattaaatttgtgtaaagtagtgtaaaatgtgtaaattagtgtaaattattgataaatgtgtaagatagagttgatagatgtgtaaaatagagttgacagatggactgtaaattgagtgagtttacactgttgaaatgtgtttaggttcgaaaattttacctacgaggctgtttcaaacttcttcattctctgacgtgactcttgagaaatcactcactaagcctcaaatctcatactctaacaccaggtaaacgctaacacatttagagtttactttgttcatttgtaaatttggtgtagaaatgtgttgagtggtaatttggaggacttgttatacgttgacgagttgagtgatgaggaggctgtggtatgtcttttacgcagatttctgcgccaaaaatacttcacttacttcggtaaggttcttttcttccttctgccagatcggagtgtaatacctggtggtgtacattcggcggatgttttgtccaatccagcccaatttctatactctgagtcacatgagtgtcatttgttctcatttttaaaacagctttttaccaattttatgactcctggtgggggtgtgagtgtatttttctatggccaaaatggacagttttcaatgaataagtcgctgttatttctcctacaaatggctcaaacacgaggagtcagagtaactaacttatttacgttgtacatttgtaatcagggagctggagagctgtttgggagaatttgtgacgtgttaaagctgttggaaagttggtcagactacaccaatgacttgggaaattccagtcagatgacaatttataagattaactttactgaaaacgggttaaattcggttaattttatccccaatttcgcttcggacttttcaacgtaatttacctacactgtaaaatattattcagagtggtattatctggaggatttccgggtaatttgagatttcccggtaattggcgatttccctcaattttctatggtcttttgtactccatgttgaaggggaagaacttacattggatcacacagacactcaccacacaacatgtcaaacagttgttaaattcaattcctaaacatcaaactcaagatccttttcgtcatattcactctttctcccaagtaatcaagtatttaattagttatacaattgtccaatgagttatataccacaatttgctgcaggtaatggagatgctgatgaggattggattaacggtggatgaaacgagagaaattaataaagtactaatttccatagtattattccaccagatggccaaaactgacactgctaactcgttaactgagtggattgaattactatgtgacgtgttggagattgggctgatgaaggagttgaatgtgaatctcaagtctaacgacattgtgtttaaagccgagcttaaaaagaacttaagtccacagctgtttagcacagttccgtcagctctatacttgaggataaaacaccttttatacactaaaattaaccaatttctcatactcacggggggtccgggcactgtaaaccctatcaccaggagtattctaatgtgtaacagtactgtggaacacgctggatcggaggataatttcagctcccgtgtgtctgaggagctgtttttgaatcttttttatcagctggttgaaaagactcttgactcttcaatcccctcggaaattgcccaaaaaaacaagttaatagtacaaaatctcacaggacccacgggaatactcacacaattaacagcacacgctattaaattatataaccaacaggacacagaacataatatcaactcctcaagtatgattacacagttaattattttaacaccggtaatattgtcgtagcactccacagtctcggtctgcaccatgaaattgacgatataatcaatctagaatccaaattacacacaattaatccaagtaacttttacactaattacacattcttaaactatttacacatttttacactatttacactatttacactatttacactatttacgtctacacactttgttacttattttacgcattaatgtgttagtattgaggaagttgttgaaatattcgaaaaatcaagtgttaaactttgtattatttactaataattcgttgcatcacattattacgcaaccagctctcgcactatcatttcactcccaacttcaatccaacgtaattcataacattcataacatatttcataacattcataacataattaataacgtaattaataacgtaattcactttagtcagtgtgtataaaaatttgtaggaggctgtggattggtatttcatttgctgtgacactgtaaaagatttggtatgttatggcttagtcattgtgttcaggagtttgatgaatctgtggataaattactcaatttctatactaaccacattcccatcctcgtatccaactttatacttttaattgatattacctgtgattgtgtaatactgttaactttgatattacctgtgatggtgtaaattgttgtaggacatatgtaacatgcagaggagtgggaacatggcgtcatatgagttggagcagtattgttcatactatttttcactactatacactcttacaaatgctaattttcatgcaaatcttaaacttttaaacgctgaacagtcggtcagactgctgttcaaattattgtcagtgggtgatgccatgtacaaaattgagggaaatatcctaacaatcaagagaacactgcaagttaaaatgctatcgctactgaatgattatgttaaaaaaaatttgaaagtagcagttaccttacaaaattggtacaaatccaggagaaacacagggattaaaagaggtttggttaataaaatcactcgcctacaatccttaattcgcatgaatttaatcaagaaaaacatcaaactacaaaatcaagccaaaatcatcaccaatcaactcatcagtaacatgctactcagtctattatactactcagtttgttatactatactatgctgctgcagctgtactatactttttattatatcaagtatataattatttactatatgcttaattttcaccagataacacactccctgacactacctaactacacaactgtatatttacgtaaactgtatatttacataaactgtatagcatgttgtgagtgtgcactaatttgtaggtactcatgataatttgtaggtacgtgtgtgttgcggtgttatgtgtataagtggttgtgtgattgtgacagtaagactttggacttgttgaggcctgaggagaagcgatttcacgagttggagtttgagtacttgcaaaatgctgctgctaaatacatccaggcggtatggcgcggagcaataatacgtaaaaaatactccacgttcagaaaacaaagattcgaggatttcgcgctaactcttgtacagagttttatccgccggatactctcgtgttacgagttgctaaatgtcagaaatgtgaagtacacaagctgtgtcatgatccagtcttatttccgcgggtacctaacgcgcaaaaggtatcacaagttacaatcactcaagcttatattattacctgttctactaaagggtacgcgaatttgtggtatgaatgagcaggtaaactttataaaactgtacaaggaccacaattccatgtcactacagatgaaaaggttaatttcagtccagactaatttgccttttgggtttctgaaggtgcaaaatctcgtccgcatgcattttataaggaaacagtttatcaccttgaaacgtactttggaactggtttactcagttgccatgactaaatgcgccagaattgaatacttggaaaaggttaaatcggcagttaaaatacaacgctggtggagactaattcccaaagattccattcccaggctcagcacaggttccctttactacctaaacctgagggaaaaaaataccgtcagattactcagtagcgagttggcagagttgggaacagtgatttacagctgtaacgtgactgcagatgtcagaagagtttatttgaatacgtgggcgatggtgccgctgacactgattaaagccctaaggctaatgcaaaaatcagccacagacttaaattacacacaaatgagacccatagaatcaatccaattcgccatcggtgcctcacactcactcatactcatccaaacacaaaacgtatactaaacattacaatttgtagaatagctaaccattgtaatagttatttagtaaaatatagcggcggtaacgtgatttagggttcgtgtgtgtatagttggggttggaatgacaagggccaactgggcaggaaatcgttatacccactcaaatcctccgataatgactttctcatcactaatcctctacaattccataactcctctgcaacatttaatactatggaaacatttaatactgtaggaaatagtgtggaaacactgaatactatgggaaatactgtggaaaacactatggaaaacagtgtggaaccagtgaaagcggtgggaaatggtgagttggaggactacccactatactccgtgatggaggaaaatgtgttgatagtgtcgatagtgtgtggagatgattattcattggcgttgagtgatgttggagtgttgtacagttggggtgacaacagtgttggccagtgtgggctgggtccgagatatcttaaaatctaccagccggcaaagttggacttagttggcgtcacatcaatttgtgccgccagttatcacagcgtcgtagtggcaaatgaggagttttacacctttggaaaggcgtttggacgtgatattttcagacccgtaccactcagaaaattggtaaatttacataaccaaacgattaaaaatgccatttgcgcagggaatctcacactcttttacaccaaacaaatggattacgttctacacatacataataaccaagtgagtaattcaaagaacaaacacatttcgagcacttctaacactactaattctaacactgtaaaccctgtgaacggtgtgatgtatagttaccctgggagtatagtgtgtttgagtacgaatgggaggataatttgtggtatgatagaagttaaagatgagttaaaagtgtacttgatgggttacgtaagatgtatccctatggagaagtcagtgggtacaaaaaccttatttgtaggcgcttttagggataaatttgaaaagaaaactaagcccaagtcggttttaaatgtccacactggcgctggaatgagctgttacttacccgcaccagctgaaattctgttacccagagttccaaaccaaatactgtgtgacggggaacaggtcattttcatcaccaacagcgccgtttacggcgctaggctctttagcttagtagtggacagtccggaagactatgacgtgagggacaactccacagtggaaataagacccggcgctaatgtcaaactcgaccccgcgctctaccaattcacacacccgcacaataaaaaaatgaaattacacaccgctttcaacactctctcacactccatcctctacgccaccaaataaccctttctctcacattttcacactaattatataattttaataattttaataataataaaaattttaataataatttaataataataataatattttaataaaaatattaatgttatggatgaggatttgtatgagttgaattatttggcggcggagcgtttgagggggaggatattgtcggagtattcgttggaatctcacgagttaccagcggctaagtataaaagtaaatacaactttattaccatcgataaaggtagtaaatcgtgtaaaaactgggaagattacgagaaatttgggaaatcgcagccgaacaggtgttactactgtaatattaagtacagcggcgttttgaacctcgtttcaatgtcagactcagtaatgttactaatggacagcatgaggaactgtgtactggaggatcagctactcctagtccccagctctcacgtgaaaaacgcgctttttctagatgaaaacgcctacactgagctcagaaattatcaaaaaacactcgtacacatgtttcaacaactgaacaaattcgtcatattctcagaaatctctctaacccccgggaaaaatgataaacacactgtcaacacagttaacactgtcgacagagttaacagagtcaacaataatgacatgagacattgtagaatagaatgttatggtgtggacaaaacgtattatgaagatgtgaaatgttacttttcaaaggcgattgatgagattggatcaaactggagtgagaataagaagttacaagtgactgggaaatcaggtgtcagaggtgtaataccacagggtttcgactatattcacatcgatttctcactctcaggtgaagcaattgccaaagtcattgataatcctagcactgtaaaacttacattttcaagagacttaatcgcatcagcacttaacttaaaccagctggaacgcaaatttacacaccctcaacaatataatcaagccataaataacataagaaaaatgtacaaaccctacgattggactctataatatattttaccatacactttatatactcagcttatatacataatatattgcatattgtatatagtatattggtatgtataatggtgtgggttaattttgtaggtctagagaattgatagttgctctgagttctttggtgattttttgtgatttcctaacccagttgccattaactttattacaaaccttgaaactattatcgaagataaccacaaattccattacttcctcgttggaaatgtactttacggggtacggctcaccaggctcacggtcccaaacctgctcaccgttatagaatatctcatccacacgccgatcaccaagtaccaccaccaatatcctacgatctccctcattcttcacattgtcattattaaccttattaacattatcatcattattaactgtattactactgtcaatagtgttattattgttgaggaggtgtgagtttgttttgggaatgacgttgatttgtgtcttgtgattattgtggaagttgaggtaaaaaacgttctccagcaggtttaggcataggtttaggggatgtccggaccagaagtggtatttaaaagtccaaacaagttctccgtcgtacagaattctgctacagacgaagctgaggaaaagcttgaaaatcagaccaacgagctctgatttacagtccaagaacccatgttcattttcatttttatcaacgaatttgagcttttcaacgtcaaatcttgtgtaagtaatgtcgacccagggtttattcttgccaaacctgcagtgtaacacgggcttattattctccagtttcgccttgtgataacgctcctttctgaccattttctaaaaaaattacctataatttaactttatttatgctaattgcttgttttcatagggtttacgcaattttgccaaaacagctagccaattccagaacccactgcacacacatactattacacatactattacatatcatatacagtttattaagaatattaagtgatattatctgagatatgttggtagtctatggagttgagtgatttctgttcctgggactgtgttttttgctcctgtaaatactcctcctgtaaccttaacatgtcttcactcgtaaagccttttgaggaatataactcgaaagccgctcgatttaactctagaaacacatgtccccaattaaacaccgataacactctctccgcactatccgccattcctaacacagttttcaaccaatatctgattaacaataattattagtgttacgtgcgatgtagagagctgaagctagtgcttcagcgcaggataactcaaatggtttcccaaaatgcgttggatttccagccaccaaaaacggcaatatccggccattccctatgaaaacaatttttacacttaactaaaaatcaactaaacaaatgtgtatagtgttaactaaacaaatgtgtaatagtgttaactaaaaaatgtgtatagtgttgaatacgtgtttgaaaggagttgagtggtgtttgtgtgattttattccaggagcaatcgatgactgcgatgcctttgtttttgacaatttcagcgtcacttagggagaataaagtggttgccaggggagttagaattatcccagagaacctttgcgtcattggtaactcctttacaaggccaaatcttaacagccttttacccgtacaacgtttaacgtcacattggttaaaatgccacaaatacattcggacttttaatgtctttacttcatctgtgacgtcagaatcggacacattttcgtcaaatttagactcaaaatgttgtaaattcggctctaaatcacctaaattaggctctgaatgttgtaaattctcttgtaattcgggaggctcgggtgaaatattagatttactgttggaatcctgtggaatttggctggatttggtcaattttagtgcgtttgcgtacacgtcgtggatattcgcgcaattcctcctaccaaaatttttacccctaaatccaaccatacttcatataatttcatccattcaacatacaataaaattttttaaacacattaaaataatttaaataatttaaaattaaaattcttaaaataattaaaataataatgagattattgaaagagtttgatggtcccgtcccaggatgcggttgcgactgtggagttgaggtttgggtgccatttggagtccatgagtgccattttgtgtgcgttgaatgtttgtaggagtttacaagttttccagtcccaaatgaataatttacctctggagtcgccggagacgacgaacctgccatcgccagagcagcttggtttaatggcgtagccgctgttctgatgtcccctaaacctttttctaccaaacagtttaaacctggaacttgaagtttcatacaccagaatctgattatccatgctctgggctaggataaacttatgactggggtgtgcggcgaccgcgggaattgtgtgaatttcagggctggaaattgactttacaaccactgggatgttgtagtcccagactaaaatccgcttatcatcggcagtagtgaccagtctccggtgatcaataaatgtcacagtgttaacacagcccatgtgctcagaatactcgagcacgcagtcgccagtcctgttatccagctgtaaaatcttattattgtcaccgcctactaggaagatattactgtccacagggcagggagttaggcaatacggagtcttgtcaattctgtacacgccgataatcttcccatactccgtgtcccagagtatggcattattgtcaaagctgagggaatagaatttagtaccagtttctatgaaactgatgtccctaacaccttttacgtgggctttgtagtttcggacacatttgtgcgtgctcaggtcccagagcttgacaaagccgtccatgccacaggataataacaggttaccggccggaataaactcaattctatacaccgacatcgtatgacctgtcatcacacaaatttccgatttagggatgtaatttttaacatctctactgtgcatatgcgtagacttggtaacagtagatttggtaagtattggtttatatttgttatcaatttttttgttgtatgttgagactgtgagggagttgaactgtgtaaactgtttcccgtcagcggtgattacctcgttcatgccctcggcctgctcaggcgtacacttcaccagccccctgccaacagttactttaaccttattttctaatttattctcagtagcgggggcaccggagtgtacgggaagctcggcctcctcgtatggtatccagggaccaaatatatcctcaccaacttcttccctccgaagtcttctcctaacactcacactaacactaggagtttccacagtattatctacagtattgagagtattcacagtgttcatattgttgatggtattgagagtgttgtggaatgcggtgggattgaagtagattttctctgcgattccggagggtgtgacgttgacgccgccaaggctggcggtgttacagaagttactgccgtccctggcgtaactctcagccgcactgtgacccctaaaccgcacgtcgtccaccgcataattctcatacatcatctccatcctcacgtgctcattcacaacattctcagtactattaccaatactattactaatagtgttagtgttagtgttggtgatgggaatggtgagaatgcctgaggagttatgcctggttcctaattgtacagacaacactccagagtcatcatcccgcaccctagcaattgtaccttcccgttcccctctctgtttattactatgtgtgttagtaagtgagttaagtgagttagttgtgtgtggtgtcaaatggtagtcagaataaaggcgggatttgcaggagagtttagtatcattctcctgagctgagagtatctgaatctccgaaccactctccgcactattaaaggccaattctcccatatgtaaacgagattctcccgtagatgaacaatattctcccatagatacacaagactcttcagtagatacacaagattcttcagtagatacacaagattcttcagtagataaacgcgattctcccatagttgagccaggatgtagcgtaagataacaagtggaacagtggataaaaaggggaaatgtaggagaagaagaagaattaaaaggagagctacaatgttaagaactaaatataaacctattaggctatggattagcggatcaaagaggggaaaatagaggtaaaaaagcgctgaaattggatttccgggcgttgagcctaggatccggagactcagcgaaatcttaatatgaagtataaaaagatcaagataataacctgcgaaattgataaaacagtccgagccgagggtgtcgaaaaagtcaaagggatttgacaaatctaaaaagtaaccagaatccggaccatcagaaccattcaaagccatctacaaattttacaaattttacaaattttacaaacatttacaagtaatttaaagaacatttttggaaaattaattaatttatttttagggaatttcaagatcaaaaacctcagatcgggctaaaattccaaaaattcaacaaacacaattttttcattattctattgattttttcattaaattatcgaattatcattaaattattgaattgttatatttttatcgaataattatatttttatcaaattattatatttttgttgaattattaatttttgatgttgattttgtgattatgttaattttgtaacttcttagcgcttaaaaagtagttaacaccgtacataaggtgttaacagcgtaaaaaacagaaatactatagaaactgtaatactatagaaactggtaaatactgtggaaattagtaaatactatagaaactgtgtaaatactatagaaattggcaaatactgtggaaataagtaatactatagaaactgtaatactgtgaaaactgtgtaaagggtgaaaactgtgtaaagggtgaaaactgtgtaaagggtgaaaactgtgaaaggtgtggaaactgtgaaagaattggaaactgtgaaagaattggaaactgtaaaagaggtggaaactgtaaaagaggtggaaactgtgtaaatactgtcgaaattgtgtaagatttggcgatggactggaatgacttgagggtgtcttctacggttcatttgagtaacaactctgtgattaatttattcaaactctcccgcgaatttcccagagacttacaccataaactcgtagacaaacatttacataatcatttggatgggaaaatttgggataaactttcagatgaacattgggataaactggacgggaaatcgctggactatgggaggatatttgagtctgagtttttgaactctgcgtttgttaactttcacaaggatcttcagctctgggacagagacaaactcaccgtcattgacatcatcaccaaacgactcagaacatcactacactccacacaatccaatctacctcccaacaccagtgcaccaggtcccaacaattatcgggatcccaggagtttaccggatcctaggaatgatatgaatggtaggactgtaccacatgttaggagtggtgatgaagagttggtaatggatttggagagtgagttgttgataagttggttggacaggtatgtgtctgatatatcaaatataagttcgggtagtaaaatatttatggaaaatgcagtaaaattgttaaagaaggtggatttggccccggtaaacctgttaaatttcatgtttagtttggttaaattagccgcagctaagccgcaaaacttttttcacaagtacttaaaactgtcactcgcacaacttgaaaaacaagccttcagtaatttacactattacattcttaacactaggcaacttttcctcaatgacctgattttaaacacggaattaacacccgcagagacgcttaaacttgtttttcaaactgcaaacactttttatgccagtgacggtgggatcaacggttttaacacagggaaattacccgattattactttttcattctttatttactcttcaggtccgggtcacatagttctataagcctattattaacatatttagaaaagaattcgggtatctctggtaccagggatattgagggatttagcatgagtttgcatgaggtaccgccgctgtttaccgatttgtgccgtgtgttattgaatattttacttgaaaaatgcgataatactgatttactgccacagtttctctcaaagtatccgcagtccggtgctaccagagttgacaacactaacccactggttaactatgggaccggggtgaaccctatgactgttaacacggtaaacatatggttggagatgttattgtcgatagtgtttccggataactatgtggagtgtgatgtgagtgttttgacgagggaggactacatatggtacaagctgcggctaatgttaaattccggcagtttagtggtaagatcctacgagttgtgtaaatccctgacgcaggagagtattaacgctacggacaaggatttattcgacagaatcgtgtcgtacgcttactgcatggcgttgagtggcggggtcatggagtcgctgaggctactaatgtcagcagttaaagtaccgcaagtacagtcaatcgccatggttttcacagttctgggtgaaaactgcggcctcttcgactttgaagaagttaacttcgtctcatacgcactgtggaatttcgtggaccagaataacaaactagtaaagtcacacaacacagaggaactgtcgtatcttttactactcgcattcaacaggaatcggaacgtctcaacagaactcaaagttcttctatcaaccgtacgtacagagtttagttatcttacccttaaatatgttaatttacccttaaatagttaatttagcctcttaaataggttatttagtagttaatttgccctttaaaaggctaatttggtagttattttaccctttaaaaggggctattttagcgcttaaaagggtaatttagtagttattttagctcttaaaaggccaatttagtagttatttggcgcttaaaggcgttaattttatcgtttaaaagggtcattttagccctggaaaagggtaatttagcctgtaatttaccctttaaaaggggctattttagcgcttaaaggccaatttagtagttaattaggcgcaatttacccctaatttacccctaaaacagctataatttacccctaattaactcgtaatttacccctagttaacacctagataacatgtataacaatgtgttaaaagtgttgtacagttgttgcctgtgagtaagagcatgttgggtgtgaagtattgtgtttcggagaactttaacgacgcggtgagtccggcgtatttgggcagttccgtgacaaaggacggaatgttactggtcggcccgctactccagaagttaatcaagctctccagtagaagaaacgcggctaaatacgccatactcctactcgcacaatactgcgcatacgtaggactccacgccgctgccttcaaatgcttctactgcattcaagacaccgataattgcgcaggtaataactatagcatttagtcattacgaagtggttgtgataattatttattttcacatgagttgataatgttgtagcggttttggaggcgtgttgctgttacttgtatgacaaggacgacgggaagaaaacgttcagcattgatgatctactcgtttactacacactcacaaaggtttctcactattcacatagtgtcactacttatagtgcatcactacttagcatagtgtataactactatacagagtagctatgtgtaatattacctgatgtgtagaacttatcgcctgggaataagcacgtgttggagttgaggaggacgtttagttgcatagaattgtgcgtgttggtgaagaataataaatactttgaagccgtttcatactgcaagaaacataaagtctttgataactcattgctgatattgagaaatgagtcacaccaaatctacttcaacgcactcttctcctacatcaaagctctcaaacttctcatcgccacaggatctcaagtatcccactattcacacctatcattattagtattaatattatagtatagttagttagtatagttattattatagtatagttagttagtatagttagttattggtaagaattgggttgataatgggtagccgttggagttggtgaatgtgggagatgcgagtaacttgttggatttgttggaggcggcgtatcagaacccaaacacagatcgcaaattaacaatagaagcactacacacactactaaccttcatctccattaatcccaccaaataatttcatcacacactttataatatttatctccattttatgtaaacccagacacacatttaaccccttagcacagtaattaactgtaatacacagtaatacacagtcattatggttataaatgtaataaagtttactgagtgataatgaagtaatgttgaaatgtagagctttctagacctgttcccgggaccaggcttggtaacttgatgttctccagagggttaataaaagtcttattaaacactttaacacttgtttattactattagagtgctaatacagttgttaattcatactttactatgctatggaaatactctttaataccttataatactactatacacttactactatacatatacaatataccattgtatatacactatattaatatactatgataatatactatgataatatactatgataatatactatgataatatactatggtaatatgctatgtgtagattagtaaaagattagtagtattgttatgattagaagtagttgaatgtgattagtgttaaaggatgaaacggtgtgttcatgtgagaatggtgagatgacaaagtattccatagggtacccgtgtacaaaccgtactttgcctaggtttctgcatttattattaacgttttgtagttctctgtagttgtcgacgtagttgttagggttttgttcgtgagggttcgggttaagcatgcgatggatttgaagcatgagttcagtggagattggcaacgattccttggccacataccacctgacagtttcctcacagccaggctgcgtgaaggacccgtcgtacgcgaagtaattcacgttcttcacctctagcatcatgaacaacgaggacaagttcagaggagtgtcgagatccacaacgggtaaaggcgtttccacgtggttagtgtttaaatctccaactgaaggataattgtcattctcagtcacggggactgaggaaccagccttgaaaacttcactcatgaaccgttctgaagggaacgtcttcagactctcaatgttagttttctcaatctcctcactcataaaagtcagtgatatcacagcccacctgccccaatgcgtacccttttccctagccattcgcttttcccgtatgtgcacctgctcactgttcaggttattcgcagagttattcaagtgcgtcagcaaatatttgttaaacaagtcgtaacggtcgttttcaagtaatttcttgtaactcgaggatcgcccagagttcagcgggtgtaaatcatccgataactggaccatactcgggtggtcgtcagattcataatagaattcaggatgctcatcctcatccaaattagttgagcgcaccgtagtaacaccggatttatgactagatttgcctataaaaatttatattgaggttactagagtaattaagagtgttaggattgggtagggactaacctggagtattagtttgaagattcaaatgtgataaatcaactgatttcacattatttccactacttacactactattcgtagtaacaacacccgtactcttagctgtagtattatgacttgtagcaccaagagtacccgtggtactactactgctgctgctagtactattgctgctactactaccattactgctgctaagggtattactactactactagtggtagaacctgagtttggttttttgatggctttagtgatgagcatattgacatcggtggtgtcgggggagtctatggacccgattccgagatcactggagggtgaatcactgagatagtgccagatttgcatttcaatttgtctgcgattggcagacccgtcgaaggtatgttcactgggtgagtgaaagtcgatatgagtggccaagtagagactgggtttatcagtggtaaacagtgcgccaaaagtcgagccttcattttgcggcactgtaactctaaacacatttggtgacctcagcagctgaactgtagacaagtaatgattataagaataaaccacgtcgccccgtttccaagggttggataagtccggggcctcaccgcgtaacacagagtcgtaaaccgattttaaattatttggaaagttctcacttaaaccctccacatgcaaatccacaggtgattgctttaatccagcactacacataccatgcgtccaatccgatccatgcctaccatagtcccacacaggcactttcgatcctacaaacacaattaatattgttgtatactgtagaattatactgtagaggggtaaatggagtatttggagaggtaaatttcgcttttggcaaggggatttcagggtataactacggaaatacttaactttaaaagtatgtaaaagtgtgtaaaagtgtgtaaaactggttaatagtacctgagaaggtgagaggcgtgtaattcttatgttgtttaatgttttcctgtgattgcggggatccagaattagaatcttgcacatgcgtaaaacccacaggcactgaactcacagctcctcccaatgtatcattgttactactactattactgttgttgttatgacatttacagttgtttaggagtgatttggttgttagaaataccaaaatcagggttgattttacacatttattccaacgcatgtccggagctaattcacgtttgattttatttttacagtttcatttttaagtaagtttttaagtaagttttaggcgattttttgagcgattttttgagtttttttaatttttagtttagtaaatcctcaaatttcaggtacagaaattttccctaatttctctaaaatttacacatttttcaattttttgaattttttattattttttaatgttaggacattttgggaattagataaacttttgttccaagcacctaaactgtctactgtagacaatcactcctcatgccaaaaggtgcattaccatccttaagcattttcagccatttataccatatttatcaagtataaagagtagttattatgtctaattattatacaagtgtaaattcatccgtggcaagtgtgtaaacggcggattccacaaaattcacgtggaatttatgagttacttgagcttttcaaactctttggcgcctcttaggaactttaccgtcaagtcctcaacctccttcttcaactcctggccttcctcactcaaatgctccaaataatctaaacacaacacataaacttaacgtacatttaagctaatttataggtaatttataggtaaataacttaaatttaaggtaaattaggggtaatttaggggtaaaaatgactattttaggccttaaaaggtactaaattaagtctaaaataacgtaaatttaagctaaaatagaggcaaattaagtctaaaataacgtaaatttaagcctaaaataggccaaaataaaggtaaaataagcctaaataaacctaaattagtccaaaaataaccacaaaataagctaaaatacagataaataaggataaaataacgcaaagttaagccaaaataagccaaaataagccaaaataagccaaaataagccaaaataagccaaaataagccaaaataagccaaaataagccaaaataagccaaaataagccaaaataagccaaaatactactaaaataaagctaaaatactactaaaataaagctaaaatactactaaaataaagctaaaataaccccaaaatagagtaaaaatagagtaaatactgtaatagagttgtgtgtgtatacctaggagatgattgtatatgtcttggatatctacgcctttgtttttgatgagtagtagtaggcagagtccgacttcgtatttcatgttataaacgcgaataatcagacatgcaatgagttggcatattgacagtcccgcgtcatatttctcaaggtaattatcatctccggtaactccgttcccgttgagctcggtgtggttcatgcggtcaagcttttccaacgactgcttggatttttgcgtgtacttgtcatgtaactcgaccaaacgctccagtttctcatgccggttttccctaaacttggtcaaaactcgctctaaatcatgatgttagggtaaaagttaccagactcctgaccagtacaatgcatcaccaacgaatttattataccaatcacattctctacattagctcattgtcaactgagcaataagttgtaagtagtaatgagtaatagtgagtaatgagtaccatcttcttgtttttcttgttcggagttttcggtggttgtaaatccttttctcataaaaacgccaaatacgtaacccaagccacatctacaacaatattacacaccatacccagtaattatgtaatttgtaaaccatcagtaacagtaatgtgtgtaaactattagtaacagtagtgtaatattacataactagttgttacagtaaactgtgtgtgatacagttgaacgaataactggcagttttgaggtgagtctaggagggcgaaatcgagtaattttagtgcagatttataagttcttctgccctcacggattaatcttatcatcaactgaatcccctggatcttaccaaaccgcaactggttctcaggactacacattattcacccaaaaaaatatttaatgtgtaaactatttaatagtgtgtagaaatgtgtaatatactgtaaaaattgtgtaaaaatgtgtaaaaatgtgtaaaaaagacacgttagtgtcaaaataagacacggtagtgtgtaaatgtgtaaagtgtgtagaaatgtgtaaactatataatagtgtgtaagaatgtgtaagaatgtgtaagaatgtgtaaatgtggaagaatacttgaacatgagtctgcaaagtgcttgaaatgcattttctaccaactcctcctacaaacccattaacaccccaactaactaccccaactaactcccaatactataactaataactaaataataaataactgaaaaactgtgtaggatacttcttcgaggcattcgggatctctttttctgtagactgacacgattctgagaagttggtcaatcccgtccaacggttccttggcgccaaagatggcaacgcagtcttcagagccttgtaaaagtatgcagagaatctcactggcgtaaactctgttagtatcataggccatagtcttcctgttcttcatgcgagttaacagatatgacaggaatttcttatccttagccaggtcattcaccgctgtaggagataactccatcaagttctccaataactcaaaactactcttcacaccattatagtccacctcgtccactattattaatattgtaaatattatagaattttgttaacatttcttatagtgtaaatatttcttatagtgtaaatagtgtaaatagtgtaaatattgtaaaggtgtgatcaccttcttgaatgagtaaaagtgtgttaacgacgagagagtgtagtgaaagaagttcctgaatgggaatatttgttgtgtgaggtaccaggttagtggtaaagtcgtgtgggttctcaagagagaagatgatctcagggtccaatatctcagacaacacattaatacaactcatcccaatgtctaatcattattattattcatattattatagtaaagtgatttggaggtgtggtaactggtagtatctgggccgtcaagcaataactaaaattacagtaaatacatagaattttagtttaattttaaatagttttaagggttttaaggatataattagggaattttatgctaattttgttaatttgaggggagtgttataggaattttttagctcaaaatttgactaaatttaaccaaatttatctatttttaggtaagtttagagttatttaagggtaactagtggatattttagctctaatagatggataatattggataatactgggtaaagtgaggctgatgatgcataattagaccaaattttctatactgattaacaacttttagaactaaataaaagcattttgatgactaaagcatcgataggaatgtgttaaaattggttaatttaattttctaaatagtcgaaaaattttcattttcccggaaccaaatgtcacttttgggtccaggccaaaatggacaaatttcgaaaaaattttttaaactaattttaactcaaatcaacagatttaacattgttaagaatcagaaaataataattaactcgtaattatctgtctacaaagtgctatagtgtgcttgactgggcctggataactactatgggtaatactatactaagtatgttaaatatgtggagtgttggtttaccgatgttatcatgtgtgagcatgttggagagtattctgaatccgtccagtaggagaaactcgcggtaaagcgagggcatcgtcgacaagtcaccaaaaaaccttatctgctcatccaaatccacctcagacatcacccacctacaacatcatcaaattattatgctatcaactgagtaattaagttatcaactggataattgagttaattaatgaataattaatgagtaattaagttaattgagtgagttaggacgggatgagtaatacttttgaggattgtctgggtgtgagattcggtcgttttggttggtttcatatcttttgaggagaaggttgacatttctcttgatgttagaggcgctcaagggctccctcgggggacaattattactcaaaccagccacgccattcgtagactccattcaccccaaaatgttaaaaaaatattaattttatttaaattatttaaattatttaaataattaataattttagagattgatgagactgggctgagattccaaaattacttgtagtgtaaaataataaaaataaaataataaaaaataatttaaaaatcttttaaaaatcttttaaaaattgtctgtaaaatattgtaaacattttttcatgtagttcctaatttgaatgttatttacaatttccctaatgaagcttatatttaaaggataaatttactattgtaaagtatttcttctactttgggaagtatgaggaacctaagggagaacgtagcctacgactatctccgccgtaacagcttaatcaccgctcatagtattaatttaaaggaggatttggaggatttggaccaggaatatttggaaagatgcctgaatctatccaaaatgaaactcagatcaaccgtcgccgactcacacttcttcgaaaactcctcctcataccacaggatccacaataattcaagtaataatactatgagtaatagggatagtgtggatagtatgaactatagtaagttgaagacgtgtatacagaactctgcggataactcaagtgattcagacagcctacaacccgaaccacaccaacaatcacatctccgaaacactatttacaatactaacactgcgtacaatgtgtacaataatgatgtgtatggagtgtgtggagtggagttattggagaggttgaggttgttgatgcaaagtctggaggatgaaaacggtgtaaagggtagggaaatccgtaaactaaccaaactggtgggtaaactaaactctgtaatcaatagcctaaacgaggaactgctaaactcccaaaagaaccttgaagataccacacaactactcgaaatcacacaacacaaatatcatcaactacaatctttactcactcttaacactagtgacactcttaacactagtgacactgtgaaaaatgtggagaatgtggaaactcctgacacttctaacactcctaatactaatactcttgacactcctgacgctattaacgcacctgacaccgtaacggaagaaagatttatgtacaagttgatgcgttatatgtatgtgtttgacgtgtcagagatactaccaagtgtgtacaagggcataagtgagatgaaacacgtcctaaacacacccgaattcacatctttcatacaacagtcaattctccacgattccaaactactacaccaatgcctcacacacttgcactccgcagattgtgacactactgtagatgcgtttgtggtgggcttaccgttgaccagtgccgaacgtcaagccatcaaactcctcgagtccagtcccattattaactctatggagaatactgttaatactatggataatgtggatagtgtgaagaggggaaagatgatgaataggatgatgttgttgagtgtgttgaggtgtagtgagatagtgacggtgtacaattacctgtttgaggccataagatgtgacaacttcagagtcgtagaaatcatctttcaagccgtcataaacaacttcctcgatctacaactcttccccaaactcaaatccatactcaaacatcctcttttacacctttttgacagtgttttacacagtaactctgtacatactactgtggagaatactttacagggtaactcagttgataatagtgtggacaatagtgtagaaagattgtatggatatttgagtatgttgaattacaactttgggagtttccctgaggatcctgtgacgggtaataacctgttccactacctcgccggacatccctaccctgtggtacaccttttaaaaccctatttacactatgtaaaatatctaactgtgaagaataaagagctgaaatcccctgtagaacttgctgattcacaggtcagacgggagtttaacacgatgattgtcatggacctggcaaaccaaggctcacaactctacaaacataaaaaatacccagaagctctcaaactctacaacaaagccatttatactctcataaattctgtggacactgtagaaagtgtggacaatgagaactctgtggaacacgttgtacacacagtagacccggtaaaggatgtaaaaaatgtgtctaacggggataatagaaatttgggtaagttgtattataacaggggcaggtcgttgttgcatatgaatgagtggttgttgtgtgtagaatcgtgtgagatgtgcttattgtacattccagactacacaaacgcatactacactctgatggaatcgtatgaacatttgctggactgggacaacgcgctggcagtgtgcctggcaatgagagacacctgcgggttcctcgaccataaacgttacgacacgataattaaccagaaagaggccacgtactttcagttgttaaatatacacacgggggcatcggattcggatattaaaaaggcattcaacacactatgtaagctgtggcatccagataaacataccaacaatacaaacatcaccaaacgcgtcaccaatcatttcaaccggtattttacacactttccacactattcacattgtttacattatttacattatccacagtgtttacaatagttatttagtttacagtatttacagtatttacaatatttacattatctacagtatttacaatatttacattatctacagtatttacagtatttagagtgtttagagtgtttacaatagttatttagtttacagtgtttagagtatttacaatagttatttagtttacagtgtttagagtatttacaatagttatttagtttagagtgtttaaggagttaactagtggtagtattaggtagttattttcgcggtattttcaagggcttaggcttattttttaccagctactaattacttagttaatactatagttggtatatatagtactattgttactatagttaggatagatagtactattgttactatagttaggatagatagtactattgttactatagttagtatagttagtactatagttaatatggtatagttaatatagtatagatagtagtatatatagtatatagtattatagttagtatagttagtatacatagtataattagtatagttagtactatagttaggatacttagtatagatagtatagttaggatagttaatatagttatgatacttagtatagttaatactatagttagtatatatagtatagttaatactatagttagtatatatagtatagatagtatggttaatatagttagtagtatagatagtatagaaagtatatatagtatagatagtatggttagtatggatggtaatgatgatgattagattgtatgaggctcgagagaagttaatggatcctgcaatcaggttaatgcatcagctaaaaagagaaacaaactatcaaataccaatcccaaaccccctcacaaacaacatagagaatacccttgatggtgttgagaatacagataatagtatagaaaatagtgtggaaaatgtgttggaggggggaaatatggaaaatagtgtggagagagaggatgagaagtgtggaatgaggtttgtggagtctgtgggtgtattgagtgaagagtcgatatttgattttaacgccctcagatggggacacacctaaaacccctccctctccctaaattttttaaaaataatattttatatttaaattaacaaaattattttttacttcctacaatagtatcttacccttaaaatagtattttacccttaaaaatagtattttaccctaaaaattggagattctttctaaaagtagtattttacgtcttaaaaattggagattctgcctaaaaatagtattttatccttaaaattgaagattctggcataaaaatagcatattagcctaaaaataacatattgtcctaaaaatagcgtattggcataaaaataacattttggcctaaaatttgaagattgtcataaaatttgaaggatagtgtgagatggtatcgataaaggataagttattatcatcgcatagatcgaatgtgtattcatcgtttggcggtcatttgaatgtgttttacagtgttttattatttaactttttggatgtttgtattttatgttacttctggttcctctttgccaatgctattaagcagtttgactgtaacgcttttctggtggatatgatcgtcaactccgttctcaccgttactccgctcactacgctaatcaaatccgatctattattctacattgcgtttgtaattaacttttttaaattttggcatatttgccacattgtgggcaaattttccggtctagtggcgtttcactcactcagactctctcgcactaatcaaagcgctctgaacagatattacatacaaagactcggcatttactttaacgccatgttattttgtctcggaagacttgtgctgattatagtctctgtctggtactcgctagtgctccagaagatacgattcgtaggcggcaccggctttgaaaagaaaccagcctcagtcttcgaagaagaagcactggaagaatatctaagagataaagatcacacacacaccaaggatctagataacgcacacgaattcacactcgaacccattccataataacattctattgcataatatatattatatatatattatggtatagtatagtgtgaatagtggtatagatgtctgggtttagtgttttggggtagtaaattgagtgtcttaatcgtggtataacactgtttacagggttctaacatactatttacagtgtttaataactgtattgaacagtattaatagtgttaaggagtgttaagtaatgtaatagaatgtactctagtatactcttaatagtatacatatacattatatacttagtatagtatatatagtatagtatatatatggtagtatttggtaggtgtctgggtttagtgttttgggctagtaaattgagtgtatataacatagcgaaaatgaccttattatacattatttaagcttattacaacagtattaaggagtatttacactggaattagtgttatcttagtgtatagtaatactatataatatactcctactactatacatatacatatatatatagtatagtatatatggtataatatagtagattaagaattagtggtaagagaattggcggtgttgaagttggtagtgaaaagagttatttgtgtaaaacgctaattctcgttttaaagagataattgagtgatatggattgaggttatccatgtgttagtaccaaactactgtcccattatgtctaagctcagtacaaacgtcattattaactatgtatatgaaatctgtgatggagttatttcctaattgttagtaaatttagtaatttgggacacatcaatctagacaatagtcaacagttcttagtaaggtagctcttaatagtattaaataagtgttttaaggagttaattacgtaatttaacagctaactaaggtgtaattaacgtataattatgctttattaagtatagtaattacgtgtctgggtttatgtacacagctaataatacaacactaaatattgtatacaacaccatatattatataatacattaaattgtgtgtattaaagtgtgttaattaactttatcggaagctctgagtttctctacgatgatatctttggaggtttctatgatttctccgccgagtacgatatcgtcgaggatattgtgaactctgttgaagttgtacacaatgtcaagttcgcacacgtcaccgtaatacacgtcaagcacttcgacaatcaggtgaattagttcatatatagccaaggtgttatcagactggtcaatcaggacacagatgatgagtccggagtattgcctgtaaaccaccttcataccctctaaatcaaacacattcgaccacctacggtcacgattcaacaactccgtgtggatcttatcctccaacgatttcttcctcttaatattaaacgatgaatacctatagattaattatatctatcatatataatatattagttgaacttattagttaaatgggattaatgggagggggagtaccatttggaaaaacgagtatcgttttgagagttttggaaaaaaatcccataaatcattctcacaaattttaaaataaagagattaaaataaataagttaaaatgttcaaataaatgttcaattaaaattttaagtcaaaatccagcccattataccaagaatataaaataaaaatatatatagtaaattactatataaaggatttaagggtacaataagtataaggtacctaaaaatgatattttcagtggaatatcacatctggggaacaaactaagtattatactaatattttttattcttcaattaattttttatatttattttatcgtcacaattttcacgtattgtataatattttcacttttacacattcaactgattactcaaaatttgtataaaatttcataaaattcgttgtaaaatttcataaaattcgttgtaaaatttgtataaaatttgtatagttgtaaaattataaaacttgtataaaatttgtatagttgtaaaatttgtggtaagattagaatgtcgaggattcgtcagcagcgttggatatttaaggaccgttcggcggttgtgagtggtatgtttggaatcccgatcagcttctgtttactcatacttgtgattgtaatgcttgggatttttatcctcacgtggctaattgagggcaaggtactcatcaaagtcattgggttcaatctccccatcgtcatcaagatcatgtcactcgtctccacactcgcactcttcgcattcctcatcaatagcaccggggtcatctacttcgtcgtcctctccactctcatctacttcatctcacacgtattatcattattctataccactaactatactattaccatactattaactatactattaccatactattaccatactattaactatactattaactatactattaactatactattaactatactattaactatactattaactatactattttacactagtttacagtatttaagagtattttacagtacttaagagtactttacactattacagtatcttacagtggtttacagtattttacagtggtttacagtagttaggagtagttaacagtagttaggagtagttaacactagtttacactattttacagtagttaaccacagtatactattactatactattttacgctattacagtattttatactattttacgctattacagtattttacagtagttaacactattactatactattactatactattactatactattactatgctatagtagttaagagtattaggtactataggtagttatagtaagtaccttagggatgatactctaggtacgctagaccgtactctagtgactattacgagtagttacagtgttaggtgtacaagttatttcccctgtgtaccacgggagtgttcttagttatcttaggaacattagttaacattagttaacaatggtcaggactgggattcgaacccggtacctccagctcccactacttactaccaaccactccactgtcacactactttacacagtacaattattcatttgataaatattacactataaatgtgtagtccttattgttgtctgggttattggagttcttttttaagttccaggagtttgatgagccgtttgctaacatgacgtactatcacccgagtaaccttgacttttactctgtaattgccatttgcatggtcagggtattactggggattccattctcatactactcgctggtgctctttgatatcaggaaagccggcggctcaggctttagaagaatcccagcatttaaactcgagaaaacttcactactagaacaagccaaagcactcaagaaaagatacgaatacgttgtcaaacgagtcgcaatcttcgaaatgtcataatattcacccattcactatattcttatttattatatttattatattattatattattattgttttgttaattttgagaatattttagtgaatcgggattctgttcactccctacccactaatttaattttacacatttaccaatatcataaattaattttattcatcaatttataattttatttataattaatttaatttataattttattatttttgttaaattttgaacttctcatttttcataccgatgggccaattttacttctccctctatacaattatttccgtgtaaattaacatcttataaataataaaactctgtaaaaactgtaaagatgggatttgaagacttggtgttgaggctgggtgagactacggcgttggtgaggaatgtgttttctgagaacttggtgaaaaagtattgcaatgacgtgaagatagtgtttgaggatcacgtggacagatctcaggcgctggagggtcatttgccgaagtttgaagaagtgtaccagatgactgtgattcccacactgtggtctgacctcttcagcatcgaatgtgacatgctatgcaataaacttttcctcaacgagaacatcagaatcgcaaaactcatggctaaccatgttaataaactcggaaccgaccagaattacaacaacttcatacaactactcacacatctcaatactctcacacataacatcacacagtccaaaggtattcagagtatttacttagttggtagtatttagtactatagttagtagtatttagtacttagttggtagtatttagtactatagttagtagtatggatattaggtatatagttaggtcataatgagggtatttcagggcttgtcaagctgtactatagttctgtgtagacagttaatttcttttatttatgaattttctgattcttaacagtgttaaatctgtcgatttatgttaaaattttgaggttttaagatttttgaaaattttcgattttgggccaaatggtccggacccaaaagtgacatttggttccagaaaaaatgaaaaattttcgactattacggaaattaatttaaacaattttaacacattcctattgatgttttagtcatcaaaatgtttaaaattcttatataaaagtgtttttagctatgtaaaatttcgcctaattactcatcctcaggttcacttgaggtagtattatccaatattatccatctattagagctaaaatctccaatatttaccctaagttaacactaaattaacaataaataactctaaatttagttaatttaacttctataaaacaactttttaacctaaaattcctataacactccccttagattaacaaaataagcataaaattccctaattatatacctaaaacaatcttaaaactcctatataaatacctacaattctatatatttactatactttatagttattgtgcttgacttggccctgataacccactcccactgacctatttatacccccaaataacctcttaacaccctttatacttaactttatacccctagagggagctatcttactttataccccgagagggagctatcttaactataccctaaatacatacttaatacccctagagggagctacttaactataccctaaatacatacttaatacccctagagggagctacttaacatacttaactatataataataatataaaactactgtatagttaattttattcttatagtacctggtttaagatatgtttctggtatattatcaaatttatcggtttataacgaccgtttgaacgtgagtctccaggaggaacgagcttactacgacagttgctgtctggaattgttatatttatcagagaagcagttgctagaccggccactgtttatcgagaagtggcgcttaaaagtgctcaaattcttaaaggatttaagtctcacctttaacattgacaagtgcactcacaacttgtcaattctcttctttgattattacattcacctgtgcacacaaaattatattaacacgccgtcatccgtcagtactcttgataactccgcttcaaactctggcaccatcccacgcagtctaggtaactccagtgatctcagacattccatgggaagttccggtggtttaacacacaccatgggaagttccggtggtttaacacacactgtagaagaagatcttggcccgtttaaggagaatgagatgttaaaaattggtactgcgtgttacttattggcggcggcattgcgggagcactgggtggacataaacaaggataaatacctggaacaagcggtggaaatgagctacaacgcatttaccaccaaggaagtcatcaccgtacagctggatattattcacagaatgcccaaagggttcacctccatctacacatgcatggaatacggactcttctacctctcaaacattaaatataaccaccataatacccacggatcacaccataatacccagggtctacagggtaattcagagggtctacacaccaatactgagggtctacagggtaatacagagggtctacagtgtaatacggatcactcagttgaaatgtgtgtgggttctgaggggttagctggagaagatgttgtggacgacctaatgttatcttgttgtttcaggtttatggttcatactggtgctttgccgtggttatatcattgtttgagtaagtgggatgacatttacatatcaaagaattggaacaggtttatcccgccaagtcgctgcgcagcagtttttatcctacacatgttcctgacatacttaaacattgactcgaaaaaggacttgatctggtgccgcaggttctgccaccgcgtctttaaaatgttcttcgactccgatgtcgcactctggtaccacgtcttcaaggaaattatcgcatccttcctactcaacgtcgaaaaacaatcctccaaacatagggcaaactctggaaatatgagaaatgtagatgtgcgaaatgcggatatcagaaatttggatgtgcgaaatgcggatgttcgaagtgtggtgactagggataatagaataatggaggcgcgacgtctggcggagttgaagcgtatgagtgagatgagttatctgttctctctatcctcgtcaatatttacggccactgaggctgtggttaatttgtatcacgcaaagttgattctgcaacatgtatcgagtccaggagttgaggaactggccggactaaaccccaaacaaatacaatcgctactctcaaacatcacacacattctaagaaaatcttaatctcacatttttcaagttttctagttcatttatatagttaatttaggggggttttagttcatttttctagttagttttctagttagtttacgggtgttttagagtaattttgttcatttttctggttaatttaggggtgttttagggtaattttaggtgatttatagctaattttcctgtgttaaatggtagttttaggggtttttagttcatttatagttagttttcctgtgccaaatggtaattttataagttttacagttattttacgggtgtaatatgccaatttatgtgtcaatttgggtataaaaataacgtaattttacctataaaaatcatatttttacaagagataaatctaaactaagcaataataaataaaaaaataagtaaaaaatacctttagaggtggtgaaaactgtactctgttaaagttggctagtttgttaaaattggaaaaaactaaaaatattacaatttaattattattttatttataatttgactggaaaaattggagaagttgttttatttcacttagagctgatgactgattcaagtggcctgtacaatgatcctgaaaaggtggaaagttacaaaaggttttactggagtagtgtagtttggttacttctaggggcaataacaacgtttggtgtgataatgtactcgttttcgccgagggtttacttcaatttactcgaggcgcaggcccgcaaccccggcgaactacagtcgaaattagtgatgtattcagtcctaatttcaggcataggcgttttaatcggaggcattttcctgccactgaacttaacggcgattgtcatttcacttgttattgcactggtgacggcgttcgccgtagtcgtgtttgtgtttctgagatcctccaaggatttattctactccttttttgcaagtcaaattagctgcttagcgctgggaatagtagatttaattggaacagtgtccgtaaatgataagtttatacccggaaatcccacctacaggatgctcctgtttcacatcgggaaaccaattggatacctccttgtcctcgctatcatttttgtactagaatttcagtctttcggacattcactaactcattcactcgctcattcactcgcacattcactcggtgataatccgattggagtaaattcaagtgtagataatttaattggagataatttaattggagataatttaattgtgagtagttttccagtggagtcaaatgtcttgatgacgtatcaaattattgtaatgaatttgcttgcggtgccgatcctaattgtgatgataaattactgtatgaagtctgacgagaatcagagaaagtggcgctcgacaaacttaataaacgccgggaaaacgttagcaaagactttatacacttacctatgcctcgaggaatttgatcatacgttactcatcgtcgaatgctccgaaggattcttcaattcagccatccgtatcctcatacaattttatccatttacccctaattagttattctataagttattctataagttattatataagttattctataagttacaaaattgttgaatagtgtgacgatgttgtagtattgtatttgtgggatccgtttccgtattttaatgctgcgtttaagacgttggtgatatttgtgttacaccaggtgtttgacttgattggccgttgtattccggcgatgatccgggcgtgcgtggggaaattcgaagtgttaatgttcaaaatacgttcatttgaggacgcgcctaggtatagaatggtgtttatggactcaaactgtttcattgagccggggacaatgtccaagactgcggccagcaagtatagaattaaccgttggattattagaaccattgttgccattaggattttcctgctcgtttgcatattattacgcagacacttggagaacaggttcctcaagttcatgaccagtttcccagcggtaatactgattacagcgtataactccatggtcagaggcgcattaacatcactagtttacacgcagttgacttcaattattgagatggacggcccgagagttcctgacgattttgacactaattccctaacgcagactgttagaagctattatcacattttccaacttgacgtggatccacacgttattgtgagtatcctaattgctttatttcgcgcgtatcataactcaggatacgtaatctgtaattttctctcgataaagtataataccgtactgtttaagtcaaataagtattatgaaagatatggacactggcccaccgatgatttcgactctcatttcctcaagttcaactggtgggttaatcaagtattcaaactcatcatcaaagacttcacaaaacccttccattgctaatcttatacatatatattatatctatattatacctatattatacttatattatacctatattatacatatattatacatatattatacatatattatacatatattatacatatattatacatatattatacatatatattatgtattaatgtatttgtatatacaaaatagtatactatgtaaagtactgagaatactatgtaagatagtgagaacactatgtatagtagtgagaaaagaaagtgttaggatattaattgaagatgtcgatgtgtagtttgatgatgtgattgaagatgagtttgtttttgagggctgaggttacgaatttttgtctcgtggttttctccattaggagcgtgggattattcactattgacattaaatctaacccatttgacgtcaattccacatcaaactcgctccaatcctcagttgacaactttttgtccacttcctcctcctccacatccatgtcatccttctcatactgttcatactgttcatactgttcatccatgacaattgtatcactggttataattctatcagtagttataattttatcagtagtgacggtgttagtttcatctttggttagctctgtccaaaagttccaattctgatagaatttgcaagtgtttaacaaatgtttgagggtgggttctgtgactggtgattccaggtgaagcaagggctgtgtaattttatgtgtgaataaagtgctcttttttatcctctttaacactgtaaacttggtatcccgcagtaaatcctgccgcaacttctccaactccaatctcaccattaccaacactcccaaacaacgtaatctacttgatttcgttgactccgttgatttagttgatttagttgacttagttgactcagtagactctgtggatttagtagactgtgtggatttggttaatttagttaaataattgatgagagattgtatggattggaaaagtgtgtcaaaggggttgtttgatttatgatgttggagttgttggaatggtaaattttggagaatgtggaagatgaaaatgtcctggctacttccagtcattcggatatccaacaccaaactcatcagcacatacaaacacattaccaaattgtccacagggtcaaatgataatttatcacagtctagacaacactttgcgaggtgtgaaatggtgttactgatgttaattgagtttagttgtatttcaacctcctcatccgtactcttgctgtagtctaatccaaccaccgaatataacacattcaaacacagaaatctgttcctaaacaacctctccacaaccaataatcccgtcaacacaatgctcagactgtcatctgtgtcaattttgtcaccacttttgacagtgtcaactctgttcacattgttaatagtgtcaaaattctgaacactgttaacagtgttaatagtgtgtttgagtgatagattgagtgattgaaggtattgtgtgagtaattgtgagtctgtgagggtgcggtaatgttccttccagatgttgttaaaggatgaaacaacttctaaaagagtttccagtagaattagcttataatttgttgaatcacaaatctcaaacacctgattcagacactttaaacatgtgaaatttagctcaaacagcttcacaggcgtaggtaagcaggatgtaacagaatttctcagaaataacaccagtctcatcttagtacttggggtacaattattgaaagtagtgtccaggagttgtaatatcacgtcagtagcgacgtgtgtcagtagataagaagacattagcatgtccgtaggatcatgggactgcgccttcgccaatattacacacacaaactccatcaaaactcccaaatccaaccgtaatcccacaatattacccaatgaacccaatgaacccactgtatccacattgttaacactgtcaacactgttaacactgtcaacactgttaacattgttgtcattggcttgataagtaatgttttggaaactgaatattacagagtcaaatgtgttggttggaggactaagtgttacggtgggaacagagggcgtgattgcgacaatgagtagcgaaacgccttggtagaactcaggcagcgcactggcgtatttcattaactcgtttaacaaatggttcctcgagtatttaaaccttttataccaataatttatcaagttagaaagggttactagacactcggtaccaagttcaaagttaccctccaacagtttaaacaccaccacagacgtcattatcacactctccaacaacacatcatttgtataacacaaatctaactctactacatcaattgtgtcagtagtgttaacaccgttaataatgtcattggagaacaacttcattgctatggagaagaagttgatgatggtaatgataattttggtgtaagggttaaagttgttgagccacgagtagccggtcagggcactaaatgagcccatttccgcccttacgagagtgttaaaatcggccaaaatagctgctaaacagtggttccacaggtttatcagcggagtgtaattactctcaaggaatcgcttaaatttctcagaattctcatatcttcccatggaaactagtaaattcaacccgtacagaacgtggtctggtaacttttcaggcggtaccactgaaaaattcatgtctctatagtatttgtaatgctcccacggtattcccaactccttagccctggaccaagctggcaccaccctcacattactcaacaagttccgcaccgtaaaacttctatccctcaaatacacagcactcaactgtatactttcaaccgtatcctccattttatcatccattttatcgtcaactgtgtaaaatgtgtgtagattggtgtgttgtagtaactctgttaggaattgtgtaatgtcagtgtgtgtagagtttaaatctgcgatcgaggggagggaatacaaagtcttgagagtgttgaaggtattttcgactaaatgacaattgtgtctcaaattcttatgattggatttgtttaaaaggtctaaaaagttgtacagttgtttgcctaagttgggtaacactttgtgggtctcatccctggccaaggcgttacacagcaaatataacaaaattgacacgtttttgttaattttattcgttagcaattggggagagtcttctctgatcaggatcacgtacgattttaacgccttgaggataaagttggacaccagtgtgttctccaaaaaccggttgaaaaccctgaaaaaactaggaaattcgcgcgataaattgtgcaaatcgtccaccgtagcgtcaaacgaaccctgacttatcgtcaatgatatcaatatcaacaccctctcatacaataacatgtccactatctcatcacacaaacccaggaaatatccatacacacttccaccacacacactaacactgggcacattctcactggacacattatcactatacgcaccataggtatacacaccgccactggagacactgtcaggtatgatcttcagaactaaagtattaatgtggtgtagaaggatgagcaactggtgtagataaaagtggttgagaaactgtttgaaaaattgaaaagtcttggagacgattttgtgtagatcaaatgtcagcagtggcagctctgagagttgaaaaagtgccatcctgtacaataatccaacacttgccagaaactgtaattccctcaccagagatacgatgaactttgtgccaacgctgggagtcagtgactgtatgaggtctacagactgcaaaactaaactcgtcagtttgtcgaaattatgcgtaaactcagccgttaattcaaattttaccctgcaaatcctggtgtaaaatgactcaacctgcgataacaaaaggtataactggacataattacctatcctcaggacctcactatcgcgtgcaggtaaactattaccatagagagttaaactattaccatagagaggtaaactattgccgtagagagttaaactattgccgtagaacaagtggtgtacaaaagtgttgtagtgggattcgaggaactttgtgattgtttgagggtgtgagaggagaattgatagcaagttgaggatacaatttttcttgtcacggcttgtgtgacttgagaataacaagttaaaacacttttcaaactgtttttcaaactgtttatccgttagaaagtatctcgcgagacgcgagtcttgcagtagcaaagttaataatttgtacagtaaatctgatgaatcgaatgttaactgtgtgaaactaagtttgagaacattttccagcgtattgtagtccataaactccttgaataacaaatcattcgtaatgaaatccgacaataaatttattatctcctccaacttttcacatttttccactaaacttccacccttctcagggaaattaaccttagtttcccccgagtttagcttagtttccgcgaaatttccacctttctcagggaaattgagcttattttcggcaaagttaatcttagtttcggctaagttaatcttagtttcagggaagttaatcttagattcggcgagagtgttgagggatttttttaagttttgtatcttttcatattcctcgttaatgcttaggtaatttgtcaaatcgttcatactcttgtaattcacatgcctattctccttcaacaactttctgacactatcactaatcccccctgtgttagattgtgtgtgagattgtgtaagtatgtctgtgtgagattccgtgactccccctgtgtgagactgtgtgtgagactgtgtgagtgtgtctgtgagtgattctgtggagatttgatgtttatttaggtctaaaatgtgctgtccgtagtagacggatttggtcaactttagcgagtgtttgtctgacgcagttcccagcactaagtacgacaaacatttgtaagaccctgtgattaaaattgtgtcaactaaagtaatttgagttttcacagcgctgaaaagtctggaggacttggacctaccagttctagagtcaggcttacccctggaactgtcacttagaaatgtgagatagttttgaagttgaaacagtttcaactgtttaaactcacaactctccgttacccttacaaataccctcaaatcctcctccaacaacgtctcagaacggaattccacaacagaatcagaggttccagcgttatattcccctgagttacggttagaatcgtgtgaattacggtgagactcaccagaatttgcatgagaatgaagtttgttaagttttgtgcaagcaccgttacggggaacaatgaagctgtggaactgtagaggtctgtcgaatcttaaaatttggtggaataaaggattttctaaattcttttggaatctcaactgcgcctcaacttcctcgtcagattttctaattatccccgaaaccaacacataattttccctaatcccaggaatctccaacaagcgactcattacaacaatttactcattataacaatttactcatatttaacatacataaaattataaaataataaataaaattatagtgtggaaaattaaagtggaaaattaggtggaaaaactgagaaattgtggaaagattgagaaattgtggaaaaactgagagaatgcgtcagatgagttgtgagatgagtgatccgatgatggatgtttcgatcaaatcgtaggctaaatgagtgtgaaggcatttgatatggaggaaatcctggctgccgccgattccgtgcctcctcagcgtgttgactactgcgattcctttagccaagtcaccggtagttaacaatttaaacagccgagtattggtaaaattaatgtaaatttcgtaatcttgtggttttgaggtctgaaatagtgtgaagtacggcgagtttacgaagtagctgtagaacgcctcaataatactcggatgtgtgaattgaaatctcctaaaggcatacaaaatgttatccaaaatcaacatctctgccaatttctcaacatccaaccttccaaattcgctcttatcctccacagaattgttattttctgtcttatcctccacagaattgttattttctgacttgtgaactccgttgttgtcatttggagaattctcattttctgacatgttgtgttcattgttgtgatttggagaattgtgaaactgttggaagagtgatgtgattgtggattcgatttctttgattagtcctttttcttcgagttctgagactcttgcgatcagatccttgttcattagccagtagattgtgggaaacggcttcagcgctgatgctttctccagtgtgtgttcatacgctcttctgtgtaattttaccttgtcagggcattccccagttccatagaacaactcatccaaattgtatttcagtattgcagctaacggttcaagaaacggacttggcataggcttgccaaatatggtaagtactaaatcatataaacgaagtgatatccgaagactataggaataattataacttttcacaacatgtttactggggaatagggcgtccagtggataacgtaacgggtaaagttgattaatgttgtaggcccacttcttatcaccttcgtcagttcctgcggttttcacaggcttaaacctgttatgttcccgagtattcagaaggaacggagagataattcccaacataggggacttactctcaaccctactttcgtaatctaccctattattaacccaatctagtaatgatttactcatatccacactattcactttgtgaacactattcactttgttaccactattcactttgttaacactattcactttgttaccactattcactgagttacaactgttggtattgtgaatagtattatgaatgtgtatggcggagataagtccgaaaggttctcttttgattgcagtgttacaatagtcaaagtcagtaaaggttaaggttaaggttttagggattataaacatacaattaatagctgaaaatgtatgataaatcccaaaatcttgcctaacagattcaataaaacgatgaatcatcagtgaccaatctgctggttcgtgattagtaccaccgcctttacgtacatcttcaggctcaattgtgagagtagtaacggagttgagaaggtgccataaagtaaaataagactgggaatcgtggattacaagtcttttctccaaaattaaccagaaaattataaataaatcaaggtatcgaataaactggaaatgtaacctcgtcttcaaacttttaaaatcacccgaaaacacataagactcctcattttcctcctctaaacccattttatcgtccactaaacccattttatcttttttcacacaaattagcttttttcatccaaattatcaatttttacatatttaccaaatttaacagagaatcccagaatagtgaacaggattcctcttttaaagtgtataaaaatattttacacaattggatataatttacaaaattcctacgttaaaaacgggaataaatattttacaaataattttaactgaaaatatcccaggaatttctccacttaaccaaaaatacaccgtaccatggggatcattacacaattccaactcttaacactcatttcacaatcatttcacaatcatttcacaatcatttaacatttatttaacatttattccacaatttaacatttattccacaatttaacatttatttgtaattaattaacatttataattgtttaaggtatttgacggagttttggattttttgtaaatttgttaaaatctgttgaaaatggacgagagaacgtttgtgatggtgaagccggacggtgttcacaggaacttggtaggtgaggttttaaagcgttttgagctcaagggtttgaagttagtagccgccaagttcatgatgccatcacgggaattagtagaaaaacactactcagcacatgaagggaaaccgttcttcgaagaactggtgaattttgtaacacaaggacccgtcttctgcacagcctgggaaggaccaaacgcagtcaaagtcggccgaactcttctaggtactacacactattattcatattattcatactattattcatactatcaatattagttatatattataatgtgtatggtgagtatgatggtatgagtataggggtaacgaatcctgtggaaagtttgccgggtacgttgaggggtgatttcgggttaacgttgagtaagaatttggtgcatgcgagtagtagtttggaggactctgtgaccgagtgtaatctctggtttaaacctgacgagtttgtatcctggactccaaacacacacaaatgggttctctaacccaactaatctaatacttaacactgtatatataatattactatatattatactctagaaattaaccatatattatactgtagaactaacctatattatactatagaaataacctatatattatactatagaaataacctataaaatagtatactatagaatatacactaatatggtctagaaataagttgtatgtcactatagtctagaactaacctataaactactatatattactatactataggactaacatatactatagtataatctagattatacactactatatattactatgctgtagaatatacactagtatatagtataatactatagaaataacctatatattatagtctaaaatacacagtaatataatctaaagtatacaatagtatagtctaaaatatacactggtatataaaactatagtacattgagtgtttatgtgagtagaaactgggtaataagttcaatgttgagtggctgtagatcagagtatgtctgtccgtttcctacgaatagtattggtttccctgtgatataaaccattgaaagtgctgcaccgactttatcatctacagtgtcaaatttagtcaacagcagcgcatcaatggtgcggtctgtgccctttccaatggccaaattaaacttcttcaactggtccacagcatcatttcccaccagcgcttcgccaacaaatatgatgaggttaggattattcacaacaataagcttggttaaggccgccatgaggggttcgttatcttgcatccggcccgcggtatcaattaatacaacgtcaaattggttattaacggcgtgtttaatgccttctttggctatttgcgccgggtctttgccgtacccacgctcaaacaggtggaggcccaggttcgtagtatgtgtcttcaactgttccacagcgccggatctgaacgtgtcacacgctactaccagcactttaaacccgttactctttagcaaatacgcaactttcgccagtgaagttgatttccccacgccattcaccccgaggaatactatcgaatatattccaccattagcaacagtgtgtttaacctgtttaatcaggttaattggatctttgggggttagtatccgtcttacggatgattccagggctgttcggacagtgctggaaagtgaccttagagactcagtcctcttacccaccaggtgtgtcactattgaacggccaatcatctcacaaatgtcaccagcaacgtttttggatcggagtttatccgttaaaatgcttatcggagtcactaacgactcctcggtgatcatcatgttaccagaatacttcagcactaacgtcgtaaacttgtccagtaactccgggctcttaccgacagatttgacattcccacgcttaaacacagattttacactgtttaacagtgatttaaatattgtattagttgtatcagaggtgtttgtaggtttcatacgcgtactatttgtaaatttcatagtactatttgtaaatttaatagtactgtttgagggtttcagagtactatttgtagtaagagtggtttgtggttcagatttatcggaatagtccagctcgtccatgtcctttttcgtgacattcgtcttcacatcccattgcctcatcttcttatcctttctaccactaatagtgttggtattattagtattaatgtctttgacgggcgtagtggttctacttgttccactctccacattctgaggtacagagttagtgttagagttagtgttggagttagagttggagttaatgagtatgcgtttgaaatcatggtcgaaattgaattgtatgggattgaggaaccagttgacattattccgtatggcatattccgtctcaagccttgttacaatcgccttggaacaggcgttcagtaactcaaccaacacattcgtgttctgaattccctaaaccatttttcacacaatatgttaaattattataaattatgttaagttatgttaaatattggaaaatagtgggaaattgagtaatttggtgaaattttaaacaatcaaaaataagccaaaaaagagccaaaataaggtaaaataaggtaaaataaggtaaaataagggtaaattagtactaaaattggctaaaataagcctagaatagaggtaaaataagcctagaatagaggtaaaataagcctagaatagaggtaaaataagactagaataaaggtaaaataagcctagaataggggtaaaatgggctaaaataacgcgggtgtatcaaaaaattaccttgtaggatatgaaaagagtggcgtcgagagagttgattaaattccacctgaagtgtactccgtccaaacaagcatacttatcccctcccttctcctacaaaattattcaaccaattatataactaataagaataattaagtaataatgagtaataatgagtaataataagaacaattaagtaataaaaaatacttgaagaatgatgtcgcggatgagttggttgatgttggagcatttgttatttgtgatgaagacgttggagccctggtcagggctaaaggtccaaattacaagtcctcccctcgatatcaacgctacagaatcgatcattcggtttacttcatcgcccttttaaaattttattcaaaaatccattcatttactttaaaattattattatttaaaatttattcatttattttaaaattattattatttaaaattattggtgaaaaaagggttagggaggggtggaagggtggaatcatacacagttgggtgagaagtaaattttcatgttaaattagttaaataaattaaataatttgattttgatgtttgaaattttctattataaattttaaaatgacattgatttccaggtgccaatttcaggccttaggtacctatagacaactgcttgataaagtttaaattttaataaatttcgttcaatttgatttttctgtacaattatgcgaaaataagatttggtgggttgatttattctgattttatttggtgtgagtgttttggttcgttttttgggtaaaaatgaccgtgcacctgttccgtctaaatttccgcctcaaaaacaaggcaagcactactttttatatttaatattttcgccctttaaatttgtaattttaaacaccgccgtcacttttttcgccaatttcactaaatctctcgtgacctggatttaacttaattctccgacttccactggttatttgtgcaaaaaattcatttttaactctctggtggatttatttttaatttttaaattttttcgcgaggtttagggattgtcgtgggtgtgtgtttgtttacgctgatttagggccaaattgacttttttacccctttttcgccctagttttatgctttaaatttagtaatgtattttacctctctaggctagacacggcaaactcttagacgccccttccagccctgtgcgtttctgtacttctctctcaattttagacattttttattctatcaagtttcaaattaagttttttgccgcttctctaaatttacctctattttttagtctcaggttctaaagtttttcctcaatgtaacacattttcttaatatttaaactttcaatcacatttaaccttttaatcacattttaacttttaatcacattttaacgcagttttacacattttaacgcagtcaaattttaacatttttaacgcagtcaaattacaacgcagtaacaaactacaactaagccaccctcagtataataaataactcaaaattaaacgtagtaactcaaaattaaacgtagtaacacaaaattaaacgtagtaacacaaaattaaacgtagtaacacaaaattaaactgagtgaatcaggataagatttaaattttaagtgggatgaagtttatttacaggttagacagtgtgggttcaccggttttcggctctagtgagacttttgagatggaacttgaggatgcaaacgcggtaagacctgaccaaaccaccgttttagacacgctaatgacgcctcttaacacgcagctgtcagaccaaacgaatttaaaaccgctcgacactgaggatttaacctccgccaacgctcactacactctcgaagactttttcaactcctactcacagaacactcaacgtgattcctactcacagaatactcaacgtgattcctactcacagaacactcaacgttattcctactcacagaatactcaacgtgattcccacactcagggtaatatttatggccacggcaactatagtaacgggaatatctgtaggaacgagagtattgacgatgtgtgtgaggctgggtttgacttttcgaagttgtttacatctgatgagtcaccaattgagaactcttttcagtctctgattgacttggtcaggtgcgaaattccctccaatctctcctccattgatcccaacttcaagcctgatccagctcctctcgacactattaacttgagccagctaagtgacgtggaacagaccgactctgtacccaaagtcgaccctcacaagacacgcaaaagtaagaggaaacgctcacacttttccaaatccctcagacccaaaactctcaacacaaatagtgtagccaatgtaaatagtgtgaacagtgtaaatagtgtaaacagtgtgaatggcgtgaaatccccgagtgctgttggtgaggtgcataagaagaggagagagatggtgaatagtaggcggatagattatggaataaacgacactgtggagaatatttacgacttggagtggcatccggggtttacgaggcacttgggcgccaagggccgaagtgcactgttggagcttgtgaggaaagtttacaggcaggatccagagcattataaagccattttacagtctagaaactcaccttcttctattagcagtttacctttctatagtatccctatgctctgggaacttgcacatcaatttggcatttttaagcaggcgctaactgtttataaaacgcattgcttctccaaatcaaaatccaagtcacacgcctttaaaaatgcttcgtccgcttcaacttccgtttcggggtcaggcaccggatcaatgacgggttcagtcacgggttcactcacgggttcgctcagtggttcaggttcggcttcagtatctgggtctgtgggatcagattctgagagtttggactctgaagttcagtcaacagtgaaaagagcaccaatgacaacaatgtccggccgtctaattaaacgctctaaaaagattctagaatctgcagatctggacacccctgagctcggcttaaaagttgagcccagcccagttactgtggatcccacaaatgcatctaagctggactccactaatttgaccttgaaagtggatttactcgataacaaagctaatgatcaagatttggttagttcagagttggagactccaaagagagtgttgaagactccaaagagagagttggagactcccaagagggtgttggagactcccaagagggtgttggagtctggtgcgagatcgaattcttggagtccaagtccgagtaacactctcaactgtgccaacaacttcaacgaatcaccactcacctcacttaaacgcatccccgtctaatctcatcacactagactatttattatatactttatatacttcttatattatgcataatagagttaatgtgttgttttaacaggctaaaaggtgatttacagtgagtaaatcgtgtgagttaacggctcttgtcatctttaccacttgctccttccacatcctcaacctgaatcttcacctcatcaactctatcagttaattcctcagttttcacatctgttttctcatctgttgattcatctgttttctcatcagttttaacttctgttggttcatttgaagagtcttcacttggtattgtgacactggtttcctgggttgccttggttacatcagttttaacttctgtgagttcatcagatttatcttcatctggtctggttgcagtgtcctgagttgttctagttatggtaatttcatctggtctggttgcagtgtcctgaattggtccagtagcagtgtcctgaattggtctggtagcagtattgtccagagctcttctggttacagtgacttcagctggtatggtcagaaaagtgacttcatcttgctcaggcacattgtcgtcacttggtatagtgctacgtaagttagtgccggatcgtggagttctaaacatggcaaatggctcaacaacctggactaacaaatcattaacacatatttacactaataaagtaataaatagtaagataatcagtagctaagcatacttgttaacaccattcttctaccacggcctctcgtctgatcctccacatcgtcagttgatccactcgatacagtccctacatacacaattaactcattatacacttattatacacttattatatactcattatacacttattatatacttagcgtatacttagtatatagttattatatacttattagtatgatattagtataataaaagtaccatcttggtccatggcattggctattagaagctgaaataatagcaatttcaataatttgttcatcatttttatacttgcagaattataataaataatgtgaaatgtaattaaaaagtattgaagggcaaaaaaattagctaggtaggaaaattttgacgtcgaatcatttcacaaatcctcaagttctctctacacatctgattcatactagtatccatagctatatatactattgtaatattatttatagtataaattagtggtaatttgagtaaaaaataattaatttttgaaaaaagggaagattccacaaattgctaaggagtgtgtaaaaataactcaaatcccttcaatcaactcattaaattaattgatttaataaaaaatttagttttggggaattaactccgaattgcgggagaaatttaaaaaaatgtaaattcctggctagctgagaaaatttatctttaacccccgactcaaattattcattccacactttctacaaaaaaattattaaatagtataaatattagaagattccacatttacactgtataatccctgaattaactaattatatgccctaggaagtcattgtattctcacactcctatcaccgtcaactaacataatatttagataaattactatacagtttacgaaaactattaattatatacttgataatgtgttaataactgagattaataggatgtttgttatttttggatgatataacagttgagaatattggcctcttttagtgttgtagagtcatcaaaattcaacttttcctgtggaaatagatagaataatctcggctcttcatgcatagtactacccttgagactaccgccagtagtgttgttcttgttaacctgtttgagattgctgacgtattttttgatgaattgtttgagcgaacggatggtggcgtcttgtgagactgtcaaggtaattatatcacctgtaattaacttaatcctcaaattcgtagtatcatcctgtaaacaagattttatcctcagtccaggattaatattcacaccagtaccagttctacttatactactgggagtaccagcagccatatcactgttaatccgggagtaattggtattatgatgaatcagttgtaggttaatgtcatgtggtagttcaggtggtggtttaccactcttgacgtatagtataaaaaggtcatttacggggtctgacaaggttttgaacggtccattgtcaaaggtaaacccatccagatataaattaatcacatgtttcatctcatccatggcttctatcggtcgttctaccttcattttcgcattcggtataatcactccttcaaacgctttatcttgaacattcgttttcacgtcagttgatgtgcttacaggtgtgtgagctgtagcagtggcagtagtagtgtcggtagttttagtgggatttttactactaacgtagagtagttcaacatgttcaggaacaattatttgctcatacactggcactaatcagttattaacaaaggaattagttataattatgcttagttgaggagttaactgaaagtaatatcatagtgttaccgtttggatctattgttgttaaatcttttaaatcaatcattgaatcattcgaacctctctctacacataaatagttaagttatacagtagtatagtattaatagtaccattgtccatgccactgacaattaacaattggactaagaaaagtttaatgagttttttaatcatttttgtacaccggaaagatagtttctgaaatttaatggaaatgttagagggagtgggcttaattagctagacaagaaaatctctagcacaaacaatttcataaagaattaactactatacacatggtactggcacaactgtaatgggactatctacagtatataaatattgtgtacaataaaataaggtgtttagatgtggaaaaaataattaatttttggaaaaagggaagattccacaaattgctaaggagtgtgtaaaaataactcaaatcccgtcaatcaactcattaaattaattgatttaacaaaaaatttagttttgtggaattaactgtgaattgagggagaaatttaaaaaaatgtaaattcttggctagttgagaaaaactgttctgaagtccccaccctcattcatttcattctgtaatctgaactaagatgaaccaatggttcaaataagcgcagattctttatttgtacgctgtggacttgcagcggctgcctattatctacctcaagatctcggcgttttcgcctttttatcagccatcaaacgatccgtacaatcatttttatttactcaaatatacacaaattaagttaaattatttgtaaaattaagtttgataatttgtttagagtggtatgagattggctggtccgaaatgttctggtcctccggaatctgaagttgatgatttggtgtacaatttcatgtcggatcgtaattttactccagcctcttacgctgtccataaacgtaaaaatttcacagttgtacaattatttgattaatttcaccgttgtacaattatttgattaatttcaccgttgtacaattatttgattaatttcatcattttacaattatttgattaatttcatcattttacgcaatttatgtacgttatataaatatttaatgagtatgtgtaagagattagtgatgtttatctttggacggaaagtgttcctctttgaattcgtagagtgcccagagtatgaacggtcccatgagaatacaagtccacacgagtggtgaaatttcatcaaatttcgggtcaatgtagtctgcggcaaatgttccaggctttggtagtccgattttcattttcttgtaagactccggatacgccctgtcaaactgctccttcgtaaatccctgagctcttggagctctccaaataccttcaacatgaaacggagtcgccaatggcgaatatttctcatatctagaaacaggctcaggagctaacccagtcatgggattggtcatagaattgttcatagtattactcatagaattattcataggattggtcatagaattggtcataggattggtcataggattgttcatagtattggtcataggattggtcataggattggtcataggattgttgatgggtttattgagaggttgtgaagtagccttcttggcgtaacgtataaatgtaattctcatccttaaatatattcttaaaaattaaaaaaataaacaaatttacaaaattataatttaatcaatttcttcaccaattcataaaatgattaaaataatattgattaataattgtgtggtactatgggctggaaaatctgtataataaaattgttaatgaattttgagatgaaaattaatatgcaaatttataaatgtgtaaaataaataattttcttaatattttaaataatgtgtgataatgttaaagaaaactattcctaagcctaatcggaagaaaataaccgcaaaatcagtccacaataactttaaaattaactttttcagtcagaatatcgaactcgcctctggacttgaagatgaaccgcctgaaaaacctaaacctggcaggaaaaaactcatcaaatccgccgaatcacgtatttttctccccctttctcctcattttatcattaatttacccttaattatcattaatttacccttaattatcattaatttacccttaattatccttaatttacccttaattatccttaatttacccttaatttatgtctaattagttgtatttatgagttattttatcgttaaattatctaaatatgttaaattgtgatattagggaaagatgacttggtgtcgatattgaagaaaaagggtgaatacccgaagataagatcggattctgagcgtttttaccagaaactgacagatattacaacatctgacgatttctcacagttactcgttttcaaccaaaatcacttaaaatccatcattcccaatactactgacgttactactgaaaatgttacggagtattacccggtgttaaataatacgccgacatcaacgtatggctttgtgttggtgagtcccaagagtaaatttggccctcttgagaacttgggcgagggttcgttagtcttcacattcctgcaattggaggagaaaaacgtttatttcgagagtttaaacgcttctaaattaggtcgttcagcttgttctttgtattcccaagcgcttgttataccaaatgatatttttataatttacaatgaaagttcaaaggttactgcgcaaatatttgtagtactctcgaaggttaaatggtcgaatgccgaccaagttaaacgtgggaaaaccatcccactctcacaaattaaatcatcttaatttaaatttgagtatcccagatgtaacgtaatttattcgtaacacatgtaatttattcgtaaattatgtaaaatcattgataaattacgtagaattatgtagaattattgataaattatgtgaaattagtgtaaaatgtgaataaattacagtgatttttacttcattttgggttgtagtttggtgattttctcctcagtaatggcggggtaattagttaacaggagttccacgatgggatcctcaacgtcgccctgagaataatttaactattaaatcattacctgaatgtctatacggtcagactggcctggagtgcccttaatcacattcgctcccgtcgcaaaatgctttgaaaataacttagccgcctgctccaatttcactcctaaatccacattacacgatatataagtggaattagttaaatttataactatttgacagtaagtgtaagggtaccgaagagatgtaatcctgtgacggaggtgatgactttccgtttagttctggcggatttctgtatgaaaatttcctgtggcgcttgttttggcgcttttttcttggttttaacagtgagagtactgaagccaagcccgtccagagccatcatttccaggggaaagatctcagggtatctggaactgcactccttgaagcatacgcccgtctcccacttatctccaaagtcacaaaagtcgtaaggcattgagcagaatcggcagtattcaactttaagaggcactagcgggtgcccatttgatgattttgtctcatcaggaagagatttcgactcgtcagactcagagttatcttcctccattacaacaagctattatacatatttttatttcaaataatgacaaattttattactatatttttatagtaatttttaaaaatatattttaataatttcaggaaaaataataaattatgggaacatcctcgaaattccaaaatttaaccaaattttctttacaactttttaaaaactgccaaacttattaaatttttaaatatttctgaagatgactaaattataaaaaatctcaaagtataaatgtaagtaatacattaattatctttattggtttgtatataaggtttatagcgatctttcattgggaattctcgttctccaacacattgaacaatatcgtgataagttatagtctctttatcgtataataatttggacagtttatgtaccagttctgcctttcccagtagcatatttttaaccctcaggtactggtcctcgatgattgttctcacctgctgatcaatgagctgtgccgtagtctcagagtagttacgatagaaattgggatcatccgtgttatccctttgaaatgataccaggcccagttccttattcattccccactgtgaaacgaaggcgtaacacattttcgttaccttactgaggtcgtcagtagcgcctgttgtgattttacctataaaaatatcctccgcagctctaccgcccaggattacagctattttatccagaagagcgtctctggtaaataacatcgagtcgtcaggcatttgctgagcaaaccctagcgctcctgaagatctcggcactattgacactttcagcacgggatctgcatgctccaggaaccagcccacaagtgcatgtccaacttcatgatacgccacggctaatttctgctgaggtgtgaggatatctcccgacttcttcatgccggccattactcgttcaatggcgttgtcaaagtcgaccatttccacaccatttgatgacttacgacgtgctgcctggatcgcagcctcgttacacacattcgctatctctgcaccaacaaaattcggagtcaacgcagccaactttcgagcaaacacatccacaacatcggaactgttaacagtattatctacggaattattcacagggttattcacagggttgtctgcagtattgtctacagtgttgttcacagggttatctacagtgttgttcacagggttatctacagtgttgttcacagggttatctacagtattatctgcagtattatttacagggttgtcagcagggttatccttagtgttatcagtggtaacagtttctacagtcttatccacattactatccccaggagtatctgtggtcacactctgatttacagatttgggattgattttaatgggtcttaagtgtactttgaaaatttcatagcgttcttctaggtcaggtcttgagatgttgactgtgcggtcaaagcggccaggtcttgtcagtgctggatcgagaatatcagctctgttagtaccggccagtactatcactcctgaagtgctcttgaacccgtccatctccaccagtaactggttcagtgtattctcccgttcatcgctagaccctgcggtgaagcctgtctttgatcttttcctcccaatcgcgtcgatttcatcaatgaaaataattgacggcgcgttttttctagccttatcaaataaatcgcgaactcttgacgggccaattccgacgaaaacttctatgaaatcacttccactcatggagtaaaatggcacattagcctcaccagccactgcctttgccagtaaagttttccctgtgcccggagggccacagagtaaaacgcccttggggatcttagctccgtaagactcatacgtcttcggggaacgtaaaaaatcaacaaattccgatatctcatacttcgcctcacgcatcccagccacatccgaaaacttcacattcacctacaaattcattattttacgtatttttagagttattttatgtgtttagagttattttatgtgtttagagttattttatgtgtttagagttattttatgtgtttaaagttattttatgtgtttaaagttattttatgtgtttagagttattttatgtgtttagagtagtttagagtaaaattatggataaattagataaattggatgaatagtataagtactttgaggtcttttccttctagaggtgtggctttacccaatttgaggaaccggtccatgtttggggggcccttgatactaattttcctgagtccaattgcggttagtagcattacaaggagaaatggtgttgttttcttgaattctgccagtaaattcacctcattcacgtaatgtatcgggatgtaattctggggatgtaaacccatcgaggcctaaatcacattaacacacaatataaaatttatctaatagtataattaacagctaattaataggctgaataactaattttacctgtatatcatcgattttttgttcgaaagagtcgatagttccgagtctgaaggtgatgtatttgggtgttttaatgggtgaaagatccgagatgtaacagcggcagaaatccttattaaccacctgaatccggtcaacgtaacccttgataaagtattttgagatgaactcctgaaatgtaatttcattaatcaaaacatttgtgtcaaccagttccaggaggataataaggccaagtcctaccacaaataacgttgataagtcaaaaaaacgataatatttcgactttgggtcatcctttgaatcgtcgtcatttttatccttgttataactcttcttaaaatccgataaattaaatatcttctcacgccttttctcagtctcagaattatcttttagttcctcttttctctcactttttaactcgtcttttgtatcatctacttctttatttagtttattactcaaacttttagttggattgtttggatcgggattcgattgagttgtaaatagtcttttaatatcattaacattgtgaacagtgttaaaacaattggtgagatagttttggttaagagtatggcaattgcggcaaaagagaaggcgatgtaatttgggtgagaagataaggtaaggatttttagaaaatctgaccaaattaagggggaatcgctttaaaattttggaggaaattgagtacattaaaacattgccgtgtgaagggcaggggtgaaccattttaatgtgaaatgatcaaaatatcacaatcaaagtgtaaatttgggccataatattcaaaatctatgaatacaaattagttttgcaaatgtgaaaataaaaaataattattacataatttactaattaaaattataaataaatttaattagcaaacccaatctttttatgagttgatttttcaatttttcactctcacatttcattttgtatcatatttttacattaatttacttaactttatttttataaaatatttttaaatttaaagtataaacaaagagaatttgtaacacattaacatcaacattccttttcatgattctattattttaacaatgttttttacacgttatttttaaataattttaaaactttgatcttacaacttctttaatttattataacaatttatcatttaaagtaattgtattcaatgggatattaccaaattaatgaaaaaattaactgcaaaaactaactccaattctggagaaaatactaaaaatgagccggaatctgatccttcaccactggaatccgatttctcatctcttgatttgggtgaagaaattctaaaatggctcaatcacaagaactttaagcgtatgacaaaagtccaatcactgtgtttaaaacagtttttgaagagggaaaatgatgttttagtccaatcctgtaccggatcaggtaaaaccctttgcttcctaattcctatcctaaactcttttttacatgatacaaattttgaatttgaacacctgctggacgtgttctcattaattattttacccacacgtgagttgtcaatacaaatttttgatatcatcactgattttctcaaattcacacactgtcacacgacgagtacatccgactcagctaataattcagttgatatttcagttaataattcagataagtcactacgtaatgtgtacagaataatggaaaagaatgtgtataatatattattgattggtggaacatcagtggaggttgagctaaggaatatgaaaaaagcgtgtgagaaaacatttgtaaagagtttagtagttggaactcctggcagattaagacatgtgatggacttgttatcacatgagtttgtttggacttttaggaatttaaggttcctgatccttgacgaggccgataggttacttgaaatgggattccaaaatgatttaagtaatatcttaacgcatttacctaaacaaagacaaactggactcttttcagctactttaaatacgggaatccagaacctctccaaactctgtctacacaatcatatacacatcaacactgattccactgatggtattaacacagttgacagtgtaagcttaattaatagtgttactggcgatagtgtgaataaaacgtatacaatacctaaggggttgaataattattatttgatattgtcgatggaggagaagttgagttttgtgttggcatttttggagtatttaaaagggacaaattcgactaaaattgtcatttttttcctttcttgcgatttagtcaattattttcatcacattttatccaatctcatgcgtaacggggggaccagttccggatccactgatgactccactaacaccaatactactgttagaaccatgaacattctgaagatacatagaaaaatgacgagtaaaaagaggaataaaagtattaatatgtttaaatctggtacaacggattctataaatgtgttattgtgtactgatgtcttttcgagaggaattgatgtgccggggattgattggattttacagtttgatcctcctcaggatccgaatttttatcttcataggattggcagagccggaagagctgaaactcccggtaacgcattactcttactcactgaaactgaagaatcttacatacagtttcaacataaccggaaaatcacactacaacccctgccatccaacttactcaattctgttaaaaatatgccaaatagtgttaatcccactggattaccctacggacagggtagcacagtagaactagacacaaaggttgaaggtgataggagttacttatcatatttaatggagaatccagtagaaaaaccggtacttttgtgggctaaaacggcattaatattatcatatttaagacttttaaactccagagtacgttcactactaataatatttgtttaggacagagaattattactattatcttcaagagcttttgtatcatataccagagcatattcagaacattccctaaagtatatttttgaaaaacaggtaatataaattattatatttgggcttagaaattagattacggagcactcgcaacttcactcggcgttttaagaattccaagagttaaagaaattctaggtaattcaccaaccatcgctgttattcatagttttactactgttatcatagtattattagtgttataatggtgtaggaaggaagatagagcattttgtgcaatctacgataaatcctaaagacgtgccgtatctcgacccagaaaaagaagccgacagattaaaacaaattgaacaactgaacaatagcgaactgcgttctgataaacctagcaaactagataaaaataaactgaagaaacagaacaaagataactccaagggaaaggaaaaggttaagaggacgagaacaatgaaaagagaagctaaaaggtatttttaaaggtgttaaatgtgtgttagaaggattgaatttgatgaatggaacgagttcaggaaggaagaagcactagtaaaaaagctcaaaaagaaaggattcaaccaaaaagatatcgaaaatttaaacaacgtaccttttacctagtttaaacatgttttgcctactttaactatattgtatatagtttaaatactaattagttaattaatgaggaaatttaggatgaatgtgagtttggagaggacttggaattggaggtggaaagctcaaaacgttggattctcagagggaaaaagagaaataaaagaaaaaagcattaaaaaataataatttggggaagataattgataaattttcagtttttgagtttgggagttcaacacaccatttttcaacgattctttaagaaatatttttcaaatttgtaccatagtttatttgtttagagttattttaagtttaatgtgtttgggaagttttgggttagggatgagcttcaggatgcctttgagtgcacagtttttatctagaatcaacgctgagcaagcaaatgcaaattttaccttttccagaatcttttctcacaaactgaagttgatttaattgataaaaaaattttttaactattttttatcagcgatttaacaaatataaatcagttttaacagttgtcacaaaggccattcaacacacatctgtaattcagctaaaacacgtttctgtgcagtaattttctttaaatttctttaaaataatttttaaaggttaattttacacctagaagccttttgtactagttttatttttcctttttttaaccgagtaacttggagatttgagtttaacatggaagataattttggagccttttacacaccagttttaaaaggctatgactcgagttatgaaacgtatctacctcaaagtatgctaaatgagcttccttggactggatttcacaacgatcctgcaatgttaacggataatgtgtcaacttcaggcttttttccaacaggaaactctaatctgagcaggcaaacaacgttgaaacaggctttttcgcctcaactttcaggtcaacagagttcttttgtacctcttttccctcaaaattcttattccaaaggggtaaacctgtttaagaggactaactcgtttcaatttaggcgtaactcgaattcacacgccaggtcaaggtcacttaaaagaagttttagcagtagtacttcaaagtcgaaccagtcaatgggatcctacaatcccaatctcaacactcttaaccattacaatcatttgaaccaatttaacaatgttaaccaccttaactcgaacaattttaacaatgtgaaccacgttaactcgaaccaatttaataatttgaacagtgttaacaatttgaagggaatgggttcaaatcagtttagtaatgtgtcgacaaatgtatcaagggttaacagcgtgaatgagatgggaaggaatggagtgaatgactctgtaagaaattcatttaagctaaggccaagaaaatgtaaaagaaacccaaacgtagaaaaggtaattttatactttagtttattttcctttagggatcaccgtttaacagagcttttaacagggttgtaagtaacggatttgactccatcaacacgaattttgggaccacaattaccattgtgaaggacaaatttgacgttaacgacgctgtcagattccttgaagggctggtgatgtttgttttgggcgttttcaggacaattttcggcgaattgaggtcagacgtgatttcaggaatgcttggcgccgaggaaacctccgactacgacgtggcacgttcaaattactactcacaattggacgagaaatttaagaactcaggccttacacagagaattgactacacagaagcaattgaaaacgagtataaaaggaggagaaccgtgactgatttgagagttgatgaagttccagagtatgtaaaccctcacaacactgatttcatgaacatgactgagcaggaatttgaggaatttctacttaaacaggcgttcccgaatactcctctttcagtattttatttaaccaattaattatttttaggttccacgtatctgaagtacattacacagatttgagattacattaggatttaaaataatttgtcaagattccacgttaatttaatgaaatttaatttttttaacctaaatttcccctaataattgttggtatcacccaactcatcattcatcaatattttactcattaattgtatattcatttgtatttttaattatttaattttaaaaattttaaaatttgttgaatatcgcaaatgtctaatttaaaggatgacccgtcgtccaggttaaaggcgctggagaagatgggcgtcgtcgaggatttcgaccgaatccactcgtgtacagttgccattgttggcgtcggcggagtaggcgcagtagttgcggaaatgctcacgaggtgcggaatcgggaaacttatcctcttcgactacgacgacatcgaactcgccaacatgaatcgtctcttttacacgccaaaacaacttggattacccaaagtcgaggtaaaccaacacaaaataattttttcactattatatagttaattcacagataatttacactaatttaacagataatacataacatctaataggctgcaaaggagacgttgaatgtaattaataaaaatgtgttaattgacccgattaactgtaacatatgtcgagattacgagttattttatgacaaaattgtccacggaagtttaacaggtgctcaagttgaccttgtcctcagctgtgtagacaattacgcagccagagtaactattaataaagcctgttgtaaagctgaccaggtttggatgaactcgggcgtatctgaaaacgctacgagtggccaaatccaaacctgtgtaccaggcgttacagcctgcttcctctgtgctccaccgtatattgttgccactaaaggtgatgaaagtaagattaagagagctgacgtttgtactgcgagtcttccaactacgatgggtgtagtcgcaggtttacttgcacataacgcattgaaatatttgttaaagtttggtgaagttaccaagtttctctcctacaactcacttcaggattttttccctacttactcactctcgtacacaccggactgctctgagaagtactgcgtccagagacagaaggagaagattcatctcgtaaactataacaacgagttgaatcagttaaatgagtgtaaaaactgtgaggaaactaagggagaagttgttcatcaggataacgaatttgagattcaagttttggacgcaaagtcctttgaggaagttgaacctacaaccgccgaaccagcctctaatcatgttactaataaactttcattaaccgagttgaggaaacaactcttgtgcgcatctgtcagcaaaaacacataatttcattttaaaattcactatactttttacaatatctttattttgctattgttcaccacttttaaaatatattctacattatatctttataatatatttttatgtttgtaaaattttatatttctggagttttaagtggaaatatgatattatttaatggaatcttaagagaatgataattctgaggaatgtaacatattgtatcattttatcgctaattaaacatgttttctgtactccgttgactaatttaactacggaatactctaatatgagtaatcggatcaactcaacctttcccaaatatattcctaacaattcgtaagtttctctcaaatttccacgtcatatcaaccaattattcaattatataactcatttatgtataatttatctaataatatttctaatttatggataaatttgtttaaaatttggttagagatgtcgaaacttgtattttgaataattggtgggatttggcgaggaaaattgtacttttatctcatgaacaaggtactgaaaattagattaatatgttaatttatggtttagatattgatttgtcatcttctgtgcgttcatctgttgaaactgttcaaagaaactcaaaagagcttttagatttactcagtaaacattacaacgaacttgacgtgtattttttagtaactaattcattaatttcagtgttaacgccgcccttcaatgggctgaatcaccaaatgaagtctttctaagcattaaattttctgccagatggagtagcccaggtatctttaacactttttaacacttcctaacactatctaaactatacaacactatctaatactatttaatactttataataatatcataaaattgttaggggcattacaagtggaggatgaagtattgaatgtggatgaggataaactggagtatagtgggattggaacgcattcggggaagaggaagaaatatcaagtgaatttacacttgtttaacagagttgttggtgccgagactaaggttactcctgtttccatgggtcgtttctcgataactctgaaaaaggagattcctgaggtctggaacaccctgaataagatgaacgaaaaggttccaaatcaccagatttggtgggagatgaaggaaaagtaccaggacgaatgcgataaatttctaaaggaaaataccaaacaagagctgtaacctattaattttaaactagtacattaatttacaaaatttaaattatttcactagttaaaattatttaataaatttacaaaatttaaattatttcattagttaaaattatttaataaatttcaaaatttaaatattttggtttcttaatttttcgacaattttcgctcctaatttgtcatctgatgggttgaaaaagtcctaaaactgtattattagtatataaaaacctgttctccagtgttcatatctctgagtacaatgacttcgttgccgttgtgtaaaagaggcataacaacaaactttgccatggaattgtcggcaaatttaagcgccttcatcaactaaactttgtaatcaatgtgtaaaattactcttgaggttttgtagtactggtaaactgaaatatcgttagtcctcaacaagtccataaggttatataaacacattctctggctttttgaacacggtaaagtctgatcagtatcagtttctactttttgttcacagttgttacgggtgtaatttggtgtaaaaacaaccacatcaaccggttcctcagagttgatatttactcctctaaaacataattgtcattggtaaaatgagtgtggaaaatacttgtgttttagtaaatccagaattgcgatattgcccattgcaaacccagctgagtacttaagtctaggatcacaatctaaagttaaatatttaatttgtataatttaaatacggttgaaataattgtcatatcttccaccgcctgcaatagaccttgaaagcttgcgatttctgtcaaaacattcaaacaccaacccagtataataatcatttcctctcacctaaatacataaaattagtattttccagttagtaataatagtaatagtagtaaataaatgttacaatggttaaatctatgttaatccaatttgagtatcctttttcggttaataaatgaaccaattgcctgaaatgaaagtgaattaaagtaagaaaaataaattactttaattcttgaatatcttcagggttaaatattctttgaatttcctctagagtccttgaagtttcaagtatttcctccaaaccagaacattgttcaggagtaaatttaagctcaatcaagagtttgttaaattcttcctttggtatctttttatacttatccaaagttttggaaaactgataaaaccagtctgatgaatagtttgaaaagcccaaaagggttaaaattccagggataacatttctatgatttaaggatattacaacatcctcatgcgataaaccaacctagaaatttaatattaatcaaattattataaaattcgaagttaataactaatgtgttacagattttaaaaagtgaattagcattgaaattaactcgacttcaacttgaatgtcactgattcctaagaagtaccttgtgaaataaaggacctaccaactatatctgcgttccattgtaagtgatttctcctccttccaagtcctggccgctcatagcgccaacagtctgcgattgtgtaccattttaatatattatgcgatggaacccttttattactatagtacgatgttagcatgttcataaattgaggagtgatatctcctctcagggataaatttctcccctttctatccttaaaactgtataactccttataatgctcgttatcctgaattttattattaaagttatatattcttacttttggtgtgttaatgtcaagaaacagtgaggtatgtgttagaactggcattgaatactcctggaatccaaagtttttagacgttaattcccactaaaattaatttacaataatattctaaggtttagctgatttataaaaatattaatttatggaatattaccttattttggagccatttctgtattctctgttccggtggtaaatatgactgcgtccctcttatagaatgtagattcctctgattttgtctcagaaattggtataaatttgaacagaatctgtgtgtactctaaaacaatataatcaagaatctccgtaccaagtttctatgattaaatgaataaattcgataaaatattaaaaagatgaaaacataaaatttaaagagattaaatggcatttacatgtaaaagattaagattgaagagaatcgggtttccttttatttttagcctcaagtaacagcctcaacagctgcccctcattcattattgttctctgacgagtcttcaccttctctgcttgcagctgattcttcattctcacaaacattgaaacattcttcgtgtcattcctcaatgaatttggcaaattatcaccgtatgttaccccgttttcagccaagatttgcgaattctccaaagatccctcaaatggtacttcttgcaaattattaaaataaccatccatcgaattattataatgattttcctgcacatttaacacttgcccagttaaattgcggtgttgtacttcagacatattgagcaattgattatccaacggattgttaaatttaccatcaaattgattgttaaattgattttctaatggactcatcatctgattgtccagtggattcatcattcgattgtctagcgaattcatcattcgattgtctagtgaattcataattttgttatcaaattgattatcaaacttgttgataaattgactgtccatgggacggttaagttgggtctcaatgggatggttaaattgaggatctgatgagctgaaattgagccttgtgtcagcttggttttgttcttttctaatgaaaaatcggtccagactattcctcggtttcataaggggctgatcaaatttattcatgaatgaaagtgaaaatacatgtttaaaggagtggaacaagtcagttgaagggtctgagttatttccaaactggcttgagaagaatgagcggttaaaattatcaaaatggttcttgtcaaagttaactaatcttgtggtacccatagcaaatccattatcttgatttgaagtggtgaaaaaaggagacccgggagctttggagaatttggttgtggtaggagcttgtgttttcagtgacattttaggcctgtaaataggctttcggtcaagtgactttctaactctaggcttaataaactcagtttcatctgagtttccacagaaccaagacacgtcgtaacactcgtctaaaatttcactggccatgagatatccctcacagttgaagattttgaagaaattatcaactttcatgcggggaaaagttgaggctgtgatgaagtacttggagtcgagagaccactctgacaacactgtacatggctctttaaactgtacaatttgttccatctcatgacttccttccttcttataccagaaacaaatctctcctgccaaattcccaaaccctcccaaagccaccatgtttcccagcgggttccacttgatcgtgtttctatacatgtttggaaactcaaataacggctccagttcaacattgtacaacgtgattttgcacggcatattcccttccatgatgatgaaaacgtcagattttggattccacctagcgtcatgagtcgtgaaattgttaaccttggtgaggaatttgccattacttgagaataaaagacaatttgtggttgagccgtacttttctccggccaagtctacggttgactgtgccaaaattatcaaataattgcctgaaggtgaccacagaagttcagcagaatctgaaaatttaagctcatgttgtgaaaatgaagactcagccagtgaatctccactaaattttaaagttgaaatccgaagacttcccggtgaattacttgaatcgggctgtgaaaacgaggccatgcaaatgatatctccatctgagaaagagttactggtttccaccggcttatatgaaaggtcaacattgaacaccattggtattcttactgttaaaagtagtttaacagacttgagagaagttccttcagagacaattgagtaaattccaacttgatgattgtggcagagggcaaaattatctgttgagcctacccacttgattactggccattgttcaggtgagagtctcttagtgctaaaggtcccgatgatgttcttctttgaaatgtcccagatgtgcaggttgtcttcaagacacaggcctgactctgagtaatttgccaaattaaaataaacagccaaataggtcccgttccttgaccactgcaagtgctttatgttcttacagcccaagggcgtgtacatgttcttaaactttcctacgcctctcaaggtatccattgaaaaatctgaatagaggttattctttgtgtacacgattgataacccagagcggtcatcaacgatgcagaggttgttgttctgagaacacacgcagtgtcttgcgaaacggtcctggtaccaaacacattccgcagtcaaacttgtggcaggatcggtcttttcctcttcttgtaaattctgggtttttccaggatcctgcccctcctccgatttcactggttgacacttgtaaatgtaaagcccatttttggcatgaaccgtaaacaaattcatcttaaaagttacaaatcagtgtttgcaggttctatcaaatattacaagttgtcaaatttttaggaggtgtaaaataaaaacttaatcttaaggggcaaattgttgcgatatggttaaaaccgatctatttcaaagtatgagtttgaatcgagtcataaggtttagagatggtttaaggtttattgatcaggccaattacttattagcaacatttaaaaataacaaaaactaatgtttaaagtggataaagttgtaaagataaaagtattaaacgttataacatgtgaaaagcatggaaatgagaaattaagtaaaaccgagtgtgaatgaaatattaagcttagaaatcaagattaaatttaaaaagtacagtcagttcaaatgaaaaattaatgtacagtgtgaaaaatatgtttaaaactaaatattatgttacaaaggattaaaatgacatacaacgaaaaagtataagtggaaaaatgtataaaatccaaaaataattaataaaataatgtatccaaaaataattaattgaaatgattaaaataagggagaaaagaagaaactcaaggctcagatgagatcagtgtaatgaccccagtgttaaaacattctaaccaaaagcatattcattcttatttttatttgttatctttattttttattattgtttttatttactgtacatggtttctttattttttaataccattaaatcttaacacaacgttttcttccttgcatacggcattacccataaataattacacttttcgttctaacactttaatatataaataaaatttcaacacattataaagttttatttaaaagtcgcggttatttgaagcgtattccactgaggttgttgattgaaataaatcttggaattttccaaattaaaaattaaattgataaattttctacatttgattattgcgatatttgttggaaagttttgaggcggcttttgaagctaaaagtgtcattttttcgattccaacatcgacgattttttcaccaacaatatatccaccgcttgaccagtagagaggagttccgtcaattgtcataactgctccagcctttgctccgtaaagggagcataatacgaaaatcgttgctgtttcactctcctcagtatctcctatattgtacgtagggtatatatccctgtgatcgtctttgcaggttcgcctgtagaataaatctgaactgtaatttattccaagtgaagcatcaataccgagttcttcagcagtatctacaaggcaatctatcacatcgaaatcagccactgcaggatattttacgtcaatttcggccatagaactggtatcgtctcggaccgaggcgtatgtaatggataagtctccagattttacagtcgaaggcttgtatgtaccacattttccacatctaataactatttttacgcccatttcaagtagttccttcattataggggaggcggcatttccagaaacgccgtgatataccagaagtatcatttctccatcaacttcaacttctgctattttataacacaaaaactccctatactcacagtacttcttaccaaccttagtaaaaatgtaaaagtggtataaattctctgatactatagctgctttgtggatcctatccctaggaacgcccattcttattaataacttacaatcttcgtactccattttgcctacaatagatgtttaaaacattttactaattaaagcatgctatttttttattttttaagttggcgagtatttttaataggctatgtttcagaatactatttccccatttgttagttaataaaatttttattctcttgtgtaattgttctgtttgttatttaacattttaaattctgttttaatttatatttctcccacgaagttacattcacatcagtcgatttccttaataaaattaatattccacccagaatcgtctaatttaggacagttatcgtattctgatatctatttttgtttcacacttttactcatcgtttacagttatatctaattcggtcactagttgaactttttggaaattgatttgaactctgtagataatcatttaatcacgtatttgtatcaataagactgtgtaaaactatattaattgttaaaaaatcttttgctcagagttgaagcggcttttagacctattctcatcatattctcgatacctttgtcaacttcttttttacctgaatttgattttccactcgaccacagaagaggaaacccgtcaattgtcataattgcgcctgcctttgctccataaagtgaagataaaacgaatatcgttgctgtttcggcctcatctgtatctgttatattgtgtttcccgtacgtatacatgtggtcttccttgcaggttttcctatagtatgaatctgtggtataatttattccaagtgaagccttaacaccaaattcatcagaggtatctacaaggcaatctattacgtcataatccgctacagctggatattttacgtcaatttcagcaagggaacttgaatcgtccctcactgaggcgtaggtgatagataggtctccagattttacagtcgaagggttgtttgctccacatattccacatctaataactatttttacacccatttcaagtagttccttcattataggagacgctgctgttccagataccccgtgatagacaataagtatcatctcaccgtcaacctcaacttctgcgattttataacatgaaaactctttaaactcatggtagtttttaccaagtttaggaaacaggtgaaaatgatatagattctcagttactatggcggctttgtgaattcttttcttagggactcccatccttattaataatttacaatcttcgtactccatccttgttacaatagatgtttaaaatcctgagctaattataacatttttcatttaaattttttttaattcgttcattttttaacagttgttaacaattccagtcccccatttcataccatatgaaattaaaattctccacggtaattattctgtttttatataatttttttagttatgttgtaagttatacttttgtcgcgagatggcatccacatcgccttatttctttaataaaactaatattccaccgcggatcggctacttcaaatcggtgattgtattcggagatcattcctggtttgacgtgtttttaccaatgactgacagttacattgaattcggccactacaaaaacatgaaatcggtggaaatatcctacaagggtcgtaaaattctgttgtacagttttggatttggatttgtagatttaaaccgcgttgttacggagtcttggttcctaggcgcctcaaatatgatatttttaaatttctcaatcccgttactaccctcaagtcaaatcaaggacaaggacatattcactatatacgcatcttgcaggaatgaaaatggaactttcatagaggtagattacaggtacccggcagtggcccatcccacaattgttagggccctgagaacttcatcggaaacgctgggatacacactaaaaccacaaaaatcagtggtagtggacggttattacgagaaaaaggttaaaaggccttcactcctagacgagattgttcaaactgatgtcgagttacaagactgggattcctctaacatgttggtgtactcaagtctccgtaacgtcaaaagcggaatactgacctgtgttggtctgaagccgaatctagtaaatatgtacgacgaattttcagacttttcacaataccacgaacagatgaatctaatggcaaaaatcgccctggaggcctgcgtattagttgaacctgccgtaaattaagtttttatctttaactctgtaaattaaatttttatctttaactctgtaaattaaatttttatctttaactgtaaattaaatttttatctttaactgtaaattataatgtttatctttaactgtaaattataatgtttaatcatgtatttgtaaccataatttgtaaaaaatgtgtatgtaaattaattgttgaaaaaccttttggtgagagttgaagccgctttaactccaagacccatcattttctcaattccaatatcgacggccttttcaccaacaaggtatccacctcttgcccataaaagaggaaatccgtctacagtgaggacagatgctgctttggctccgtaaagcgatgataacactaatattatagcactttcgttatcttcagtatcaactatattgtgtgaggtatattcatccctcgggtcgtctttgaagacttttctatagaaagaatcggtgctgtagtttattcccaggtttgttttaatgccaagttcttctgcagtatctacaaggcagtctattacgtcataatcagccacagctgggtatttgacgtctatttcagcaagtgaacttgaatcatctctcatggaagcatagcatatatatatatctccacttttaacctgagaaggcttgaatgagcctgctttcccgcaccttataacgatttttacgcccatttcaagtagctccgtcaatatgggagatacagcatttccagaaactccgtgatataccagtagaatcatcactccatcgacctcaagttctgcgattttgtaacatgaaaactctccaaactcgtgatagtttttaccgagtttaggaaaaatgggaaagtggtacaaattctcagttactacagctgctttgtggatcctatccctaggaactctcattctcaccaataatttacagtcgttgtactccattgtttttaaccaaattcaccgataacacacccaaattttttaaaattttgttttaatatactaaatttaaatgtgtacattgttatgtctaagataatctatttgtgtatatgtagctagaatattttgcgattagtcgttgccaccccatgggctatactgttgatcttccaggattttattttacacatagaaaagagagaacaaaatttaaaactatttctttcttttcttttcttttggagccttctgttcattctcagaatccctctcacctggttctttggacttttttacatacttttcatatattttcattactcgctcagattcgagcttcctcttgttcactattgcaggctccagcttcttgttctcctccaattcctcgggggttttcttaacgaacttgtggtacttgactaaaacacatttttaacctaaactaacgaacctgggccagtaaacacatcattctcaagctttataagagttaattgaaccctaggaccaatttcaactagtctgcagtaatatttattcatataaaaattaaccttatgccgattttatttcttgtatctgaggtctcgctaggctctaagtcaactccgtatttatttttagcgataatattctgagataaaatgttatcgagttcaacaatttcgtcggtgtcgctgtcaaaattagaattcttgctcaaagtagaatctgatgacagcatattagtgatatcctcaaaatcagacgtttcgctaatcagattcttcattgttttcctcgttaaaagatccttaacttgagcttgagtgttacagtctactagatttatcgagtagtgccttagaacaatagttccgtccttctgtttatgaaagagaaccaccctcttacagttttgtatctaatttataatatttaaatatttatatatttaccttagttgtggaaaggtcgacaggggcgatcatcttatttaaagtttcagtgacgcgggtcatggctttgtcaaatctggaggattcatcttttgtttcatcttcatctgagcctttaaatgatgattttgaaaatccatttagtactaaaaggggggagtaatttgaggagtcaaatgactgagggtttgtatagtgtttggaaatatcagaaataagtgaaaccttattaatctgaaaagtgaatgtaggtccactgggaaggtttgcgatcttcaaatatgaactttctgaaccttgagataaaactattaagtgagttaaacctagaacatcggtgacacttgtgaaatcccttaacctttgccttgatccttcctttaaacgaacggcgcaattaggagataaaattagcctcaaattttgggccaattgttttatttcatgattaaccgacccccttcttataaccaggattctaggagattctgtatctatggtatgatcaggggaaggtttagacctttttttcctagacttacccattttataattaaaatcctttaaagatatgatttaacataatttattgtaaaaattttataaaatgtacccaataaataataaaagtgttacttttagattaataagattcgtttacataaaatcattttttattaatcacacaaattatcattgatttaaaaaatactctctttaaaattttcatatattattgaataataattattccactctttacatcttacacaccatatataaaacaatttactgaatattattgattttaaatattaattttactctgttggccatcctactcgttttagatttaaattatcggtgtcaattccgtgagtgtatgaatgtgttccggccctggactttatagctgaaaccttcttcccgtcgtaattattaaacttattcatagctctgagtacagatttgtaaaacttctcaggtaaagcacattgttgatcttgggttgattgagattgttcaccagtaaattgccaagtatacgaatttgaccatttatcggtatagccagattcttcagaaatcatgtctctatataaatcccctccataagataatagcgctgatggaaagtgttgaacatcagcatcgtaagccgatctaggaacaagatcagaatcaactagtaagaatgtgtttaatggaaattcagatgaaagcttattaacagagtccagtaccgataaagaggctgtgctttgtctgttatagaacactgaaaccacaaggtctttcatgtgaattgtgtcattgtctataaaaatttagttaatatgtgaaaattacccaaaggtctgtaaacgacattatggtactggtcaaaatcagataattttaaaacattttcgttaaacggttttgaaagtggatatgaattttcagaattactgtgtaaataatgtttgcgtgtaaaattatattttgagttgtgtgattttatcttatttaaaatatttaggattgaaaagcaacgagtggtaaaagacttgctggcgtttatattaataatagatttacataacaaaccaatataagacttcattttgacaaaaattagaattatataagtagaagttgattttgtattgcgaaggattaaaatttgaggtgtatccaatatagtgcagtgaaaataatgtgattccataacacatttcgttttgttatttttttattctgctaaaaaactaattttaaattcatttttaatgagattttaataaactgacttagaattcctgtacatacacattagtgtgtgtttatatgctcattatttgaaatttatttttcaccttgacaatggtattccatcacatttacttattctgttattgtctttccctaaatttatagatatattttttgtttttttccttcataaaaccttgtcttcctctttaattcatcacaacaatgtcaaattcatattttcctatcaagaatataacaacttacaccagtaactggacaattttggggaaaatcgtggacaaatcaccactcaaggcgcttaagggagataactcctttttgttcgtcgatattgtcgataaaaacgtatgtgtgataaatttaataattttgtaacagggagatacaattcgagccaagttttggggcgttgcagctaacaaatggaacgacctgttagaaaaggggaatgtaagctatttacgaataatttaattcttaggtgtataccttttcaaagggaacagttaacttgtcgaacaaaaagttcaataccacccctcacaactatgaaataacatttacgacggatagtaaaatagatccctcggatgaacttaacgacataaaagtcgagagaaagttggtttcattgatttcatgttctttagctatgagtttgttacattgagggatataaagtccacttctcgtgacactccgttcgtggtagatattctatgtttcgtaaagtcgttgactccagtctcagtggtactttcataatgctcaaatagactttcagacgaacaccaagtttaacagagacactaaaaagagattattgtatgtcgtggatgacaccagctatgagttggaggtgacactttggggtcaaatggtatggaatttagtattctaattaatgattttagactgaattgccgatatttgaagatattctggataaaccagttatactatcacaagtcacaataaaggaatggaatggaggaagatttggccaaacaagtttgaatacagatataaagtttgcagactttcagtcggttagaaataaagataggctctcgacccttgaggcttggtatcaaaaggtacttcctatcattaatcggtgtttaaaatataatttaggctatgtctgaaaatgaatcttttaaaaccatgaaaacacaaacaatgtcttcatccagagaatcctacgagttcacaaccattgacgatgccctgaccaggtctaaggggtatttcatattcatctgtaagctgaggaaactgttttggaaaaataaggacggggagatgaggctctggtaccacgcatgcccaacctgtctcaagaaggttgtagaggaacaagaaaacgtctggaggtgtatcacctgtgacgactcaatagttacgccagtattgaggtaaccatgaacctaataaacctgttcagatacattgttagctgtgtgtttgtggacttttcaggccaactgttttcaacagtatattcagagagcggtaatagataattaaaattattacaaatttaggaaaaaaactacttggatattcagaacaggagctagatgcaatggataaggaagaacttaaaaacacacttgatttcgatgttctacataaggtatttttatgactattatattattcttaggactttaaagtctcaggtttcttcaagaataaaacttataatggagaatccaggaacacattcaacgttacaaacatagaggaagttgattacgcgaaagaggctgaatcccttcttgaaaggatgcatttaacttacgaaactgtcgaaagctttttgtcactggacaaaccggattctggaagctccccaaagaaaactaaaaccgaccaacaagaataaacacattttaataaaattttcaactcgcaatatattgtttttaaatttataaaaaatctattcacataatatctattttattccagaaatgattaaatattttgggtgtgttataccgagatttattatggaatatttaaaaattgtaaagatgtgttaatataaaatatttaagtttaatgaagctgttatcattgatttccgggggtaaagatggaatttatagcattttatgtgctagaaggcagggacatgagattgttcttctgggtcacatgactcctcaggattccaacacacatgaacttgatagctacatgtttcagacaataggtcacaatgtgatagggtctataagcaaatgcctcgatattcccttgattgaaagaacaattcagagtaatttagaaagataatgataacttaaattcaggaacatcagcctctacaagtacactgaactacacgccggatgagcaagatgaggtggaagacttatataaccttgtaaaggaagctctggtatgttttaacttattttatctgatttataaattcactagaaggtgaatagtgagattgaaggggtcttaacaggggcagtatgctctagatatcagatggaaagggttaaaaacgtgtaagtaaattcttttttaaaccatattcagctgttcaagactaaatctaacctcagtaaaccctttatgggaaaggaaccagagggagctaataaaggacatgatagatgacgggatggaagcaatcttagttaaaacatgtagcttaggtaatttcttagtacagttaaataatttaggactaaatgagaaacaccttggaaggacaattagggaactatatgaagagttattggagatggtaaggattggaggaaacttaatatagaatacaggagaccctatacggattaaatgtgtgtggagaaggaggagaatacgaaacgttagtccttgactgtccaatgtacaaaatgaaaatagtaatgtgagatttaaaaacgtaaaattttattttagagaggaacatgaaaaaatatatcattcaaaggatccgtacgccccgacaatattatatgtgccaataaaatggaggttggaatcaaagtaaaaatcattgtaaaataaattatccgaaagaggactctgaacttttttaaacaattgaatctgtaaaatataagtatgtggatatgtaaaaacgcttatgtgtagtgagatcgtcgaaaaattgcctaaaattgcgtcatgatgtagtgatgggggttgcagcacgatcttttgaaaagcatgtagtaaatcagtcttcatcacccgaggactgcaacataaatatacagtctattaccagcgttgatgatttggctttatggttaataaaaatgaccttatgccctagatatctgagctggaaatgaaaaattaaacatattgcagacgttcgggaataaacatattaaaacattctattaatgaattttaaagatgattaagaatttatattcatatttgttttcatatttagttagtacatctcgtttatataattatttttggatacatggttatactctacatttgatgcctatttatcctctcagatttttccatttacaacgaattattttctattagtactttaattttttgtatatgtatatttatctacctgatacctgtatggatcagttattaaatttttcagatgccagtagtaaacgagattttgtctattttttaaattattttaatatatatcacctttgtataattatttgatattgtatcataatgtattggcatcgttccttctgatattttaatttactaccgcaatactggccgatggataaaattaagaacctcgtaaactgtaagatttatattatcggggatgaggtttgaattatttatttccgatagtctgtatacattaacacacaaaaataagagttattaggatactgtagttggattcctccttgcaggagtagggagcaaggacgtactgggaagaacaaattatactatcgtaacgccaagtatttttttattttattaaagttaattattcagaattcactaaagctcaaattgaggaagtatttaaattgtatgtctccagggaagattgcgggataatcatcataaaccagcacattgcagaaaaaatacgaacacttttggaccttcatgataaatttgtaccaacgatcttggaaataccaagcaaagaagagccttacgacccaagtaaggactcagtaatgcagaagataaaagtcttctttggagaaaataactagtaaaacataatttagtaagaaattatctagtaaaatatatttactgcgattcgtttgaataactctatggactgtcctccccgatctcaggatcaaattgtttactatccttggtcatcctcaagaattcagagttcacctccattatgggttgatcaatgtcgtctagagattctagaccacgttctccccttttaaactcgattcccttttcttggcgattgtctactcataatattagatttagaaacgtaccgtatggaattaaccacaacaaggggttgtttccaagaaccgattttagattattacacacccctaacgaccaaattgactcttccatattgtgttttgaccccgaatacttctcacaaaactcgatggtagtgaaattctcacaaattaaccaggtgtggaacagaaggaagcaagttaaaacaagactgagaacgactgctaacaactcagcgacgattatcacaactaaatctccaaaggaggtctacaaaaattaagtgaaaataaaagttaccagtgggttatttaagaattgtctgactgtaggaaagaggagaattgcgatgtagacggaaatagcatcagaatataaagttgtcaaaaagaagtatttgtagtttctccatcctatacagttgttggcccatggacaatgatggtccatcttcagaacacatgttccgcaatttttgcagtgatgagtcctgtccggcttgaactttgagcaccatttacaaaaccttctagcgcccgatctcttggtttcatacacaacggaagtcgtgttgacatccttgttatttagattccactccaaggtgtccgggatattcccggggtttttgtacatacataatacatagcttactagttgaagaaaaaggatcagatgtatgaaaaatgtgtgacagataaccttgtcactcaatacaccataatgagccagatcctgattaatggcaggttttaaattatatactaaaaatgacccgtaaatcactgaaaacacaaataatgaaaaaatcactggtaaatagttggaaaatgatctacttccattacttccgtccacagaacccatggacctgaaacaagtttttgagctagaatttgtccgtttatttgacaataaaggctcattttcgttttcttctaaataatagggattgttaggaacatatgtggaataactttcagttcttcttgtaggaattctgtatgaatccaaatcatttttttctgtatcctcgaaatcttcatcaataattattttatcatcctggtcgtccatattttataggcctctaaataaaatattatttttccagaattcactcacttctcgataatattagaaggacattgcatttaaccgatcaaatacacttctaatgctcagccggcagaagtggaattaaataataaataaataaacagggagaaatatgagaaattgatattaatggcactttattgcattgtctctataaaattgtctaatgtgcagcaccgatgtgcagcctaggaagagctatatcgaagagaggtattctctcacgactttgaccacaaagtccaagtcacctttatcgagagcttcagtccaagaatctcttgaaattccgctcttctaaaccgtaatttattttaagttaccctcacctgttgagccatgaaggcacgaatagtgtacaaaacggtaacacattggattctatcatcaaactttagcgaaaaataattttttaattttttttcctcgtatgatccgaatgaaatctcggtatctgagtgtttggaatcctggacctgaaatgtgtagtgtttacaaatgaatcatgtaaaactaaccagaatatcctctaaatcctgttcaaatgaaacactatcttcagattcttcatcttcgcccactttattctcaaatgccttgattgaaaaaattttatgtttgtctttgtcctcctttgaaaccacaatacatagtttttcagttaattgtagttttacatccacagtttgattaagcaaatttgacttctcgtatgttataccacttgtaaagtctttgttgtaacatagagtacaatcagttgaataatcctcacttagattctcaaggatctttaaggctaggtcgttagatatgtccactggaccagcagagcatagagtagatatattctaaatgtttatgtctatacatagatagaatacgtggaattttttctcgtgagggtatgaattttggaacacgtttatgtgaggatcgtaaggtccggagtttgagaatatgttatttccttttaattgattctcaacgagtctgtgagccctgcagaatatgtatttaccgatagcttcaaatggaattttaaatgttttcccgtcagaaattgcttctggagaatagcgatcaagtgagttgtattcaattccgataaacctaataacaaataaaaaagtttgacataccattcgtatagaattactggaaactgctgagaatatggcgatgcatcaatacattctacagtgtttccattaatagttgatcctaaataaattattataagttgagtggtaacctttaatgtacactgggtatgcttcggagcttggtatatcagtattagtcatgtgttgaagttcatgtaaatatactcctctaacctcattttcttcaatatccgattcacttagcagttcaaaatggtctgactcgtaggatgagacggttccctcagtgatagacctagatacaaaacttagcaagctataagaatatgacaaagtaatatcctccacgggctttttctcctctgaaacttcagtttctctctcccatatcggtattatatggtcttctacttggactcggctcatatactaaaagagtaaaaaattaatgttaaaaaatacatcatctggcttcaattttctccttaaaggcttcagggtaattggttccgacgttttcttcttctacaaattatttttaatttaatgtgtaagaataatgtaaaaactaacatcatcagtggcatccttattgttattgagccttaaaaaagaaaaatagtcagaaacactgtccatattatgtaaacttatgttcaattgtgttatttaaaagatttgtgaataatgtgttagtttaaacattcagttttcgaaaatttaaaaacagtgaggctacattggcctaattagggaaaataatgaaatatattaaatttatacaaacattaaaaattaattgatagaatgcgtggaatatattgtctaataaataaaaattccaattatggatgcactagaatcacgaagtaatatattatttagtttttattccaatttactaaagttgtataaatttaaagaactaatgattttataaaatcgtttctctctggtttggtgaaggtatgcataactagtttcaatccttccaggcatttggttattgacaagtccttaagaaatgtgaaaatagttaaaaatacctcatgcacaaggttttctccttccagactctttaacacaactttgaagcactttttgttttttccatctttattcccgtttgttcccacttcatatccaaataaggttcttgagcttcctcccttcttctcctttgagttcgggtggtactcgagaatataactcagctgaagtattataatgttaagattgacttactaattttcccggttgtgattcaagtgataatttagttccaacttcaacttctttaagcaggttattaaggagtgttttgatgcagccaaagtttcttactacaaaatcacctataattaattatatatcataatcacatgccaatttctattgggattgccatagctgctgattttatcctttggagttcctttgatctggagttgagtgtgctcaaactcatcgcctttaacaaatttatccaatattcaacttacagattccatttttttgaattctgtttcatgatttattaggtctacatttattggggctccgtttacttgaggtttttctcccattaaatccgataaatttgatgtttttgaaagccaggcataacaagaaccttctgaaacgggtgatatgaatttaactttagcctgaaaagaacagattaactatcaaagtttactttgtttgtgccattaatggcttgcttaactgacgtccattctttaacatctgaggggatgtttgtaatttttacaattggcccggcgacgtggaatgtttcaggggtctctccgaacttcttctttacaactggtttctttccaacatattttggtaaggggtcgtttaatttaatgtacatagttccttcgaagtcatgaaacgacaaattaggtatcagattttcagaaataaccttcttaatgtcttcaattgtcgccttgatctccatcatgcgttttgcgctcaggatatacttcacgtccattacattctaaaaggtagtaaaaatatatttatgtacctctactccaacgtttgccgaatcttccttaaatttggagtgataaaagtggtcaattgacaagttatctggagataggtagaatgatagttgtctgatgataaaatccaatctctgttcaggggaagcgtgtaaaacaatgacattaaaatcatcattatcaatacgatcttttttcaatatcaaatcaatatcaaaagattcattccgacgtttagaaggattatctaaaaagtatatacataaatatacgtacccaaagtggattccgaaggccttttattattattttcagacattataaaaaattatatgtatttatatagtaatgaaagtatttatagtttaatatgttcatgattttgatatttacgttgtacccgatgattccaaacatattatagtttacaatggtcagatcatgagttatatatttagattcatacatttgcttgacattatattttttaatacataaattgataatgtttttatttcacaacaattgattgattgtttatgatttttaacaaaacattcatattttaatatttctgtactataatgaagttgaatatatcttctgatgacataaatttgttgatttatcgatacttgatagagaatgggtaacttgataaatctcaataacaatgtttaatattgtttttaggtattgtcacactgctttttcatttaacaaggagtctaacattagtggtaacccatactacgtgaatcatgctgacaagattcctcccaacgccttagtatcatttatgcagaaggctatgatttacatttacctggagtaccacactgatgacataactggagaacagattctgtgtgacgagaccttttccttctttagaaaacacaactgtttcaggaaacttggtcagtcacatggtttacctctatctcattctatgaatactcgtgaccgtactgacaatgctgatacccaccttgataagaatggtactaatgttgcttctgaaactttgaactttggtaacttaacactgcacttatattatacatagattatattcacaatatatttcattcctattaatatattgtgtagatttatctaacagtgggttcggtcgtgaagatgtattggaaactaacagtagtttgtttcaactaaatcacccagtttacgttggccctccacaaagacgcttgtccgacaaatggcaattgtatggttatcataagctgtttgaatacatgaatcctaatctctcgacagtctgtcacttcaatccagtatatgctggttacattttaaagaggttagtttatatatttaaataatgtttaggactgagaatggaccgtctagtctatacaagctgaacgagtctggtaaagcatctatttgtgaaatattacttcctcatgctaaactgtattccagtgagtctggtgctggagtgactacatcttctagatggagacaagatggtttagtcgtttgcagtggtcattctgatggtaaccttaacctctggtcattggacggtcacttgttatccagtgtcaaggttatggagtctcctattacagctgtagggttttgtggaactaagtcatattggacagattctgaacctgagtcagaaactccttactatcttgctgccggttgcaagtctggtgatgtgttcgtatataaagttgacaataacaactatgtgttggtaaaccacttcaaacagtcttcctgtgttactgagttggagtggcagaatcataatatagtttcatcaatgactgcagatggcacacttaccagctacaatgtggagacaagtgagagttcacaacagttagtacaggcaaagaatggtgttccattcatggagtgggattactatggaaggtatctggctatagtggacgaatcagactcgttgaaggtgtacagaccaatagaaaatcatgttcatggagaattatcagaactgaaaggccataatggacaactcatctatgcttcatggtactcaggaaatgtagagaaggcatcatcaaggatatgtacaatagcagtggataaacagatgatagtgtgggatgtcgcctcaggttcatcactcatgtctctagcattagatcaggtgccracaacggtatcagtatgtccaaacgattcactggttgcaattggttcatatggaaacagtgtgaagatgtatgctttacctaacctcaccttgtcatgttcattctatgacaagacggtacctactagtatcagctggtcgtctgatagacagcatcttatttacaacgttttcaatctacagaggtcacttgtagtacctctcaacactctatcatcatttcaatctgattaatatatctacacattaccagttaattagccgtatggccttgataatcatccttgtcgtacgttttagtcttccacaagtaccaattctttattttttaattattttaagtaatgtgttgactagatatttcattttgaatattattagtattgtatttgactatggggtcatgagtatcaatttttaaattgaatgtggatgtgataaaataatttaatatgtaatctttgaattttctcattaaatcaatttatctatgctcttctgacatgtttggctatctttgacttgttttagttgaaggttcggatgtcgttttaacatgtgtgtttaatgtataaaattgactgtattatatttgaaatggtagaaattatcgatgtgtaatgtgaatggacaatgttttgttgatttgtaacatattgatataaggatggagtgctttttgccttccactgcttttgttactaggaaacgtgcagatcttacagatagttgtgattctacaaaatgcgtagaaggatctgatatgaattctggctcctcaaacatatgtgatgtttacacccctattggtaactcaggttgtactgataagtctcatgactacttagatttacctggtgctgttgttgataatgaatgtgtaaaaaaggaattttcatactgcaatgaagttaaaactggtgtgcttgatactgacttccaagatgtttgtgaatctccacgtatgacatcggttgatcgtttgaacagattaaaaaatgaacttagttccacaaatactacaacaaaaattccacaatttggctatgaaccagttgacgaaccaattgacgaaccatttgttcccgtttcaacggatccacttgaatctactcattccaattcaggttctacatcaccatcaactactactcctgttaaatctgtacgttcatctaacaggagactggatgtgttgaacagtatcatcaggactagactggatgaaccacatgtcaacatcagtgatgatgaaactaagaatcctatcctggctaactctgtgagacgtaccaagggtctttcctctaacactgctgatgttcgaagatctttacaggttctgggcagttctcggtgttggactgaccgtttcgagaaccaggatcctgatgatgatgactccgtatctgctactcagagtcctgttagaagtttgaatagtttaatgaattcacaggccgatgtttccgattcatcttatcgacgacctgtatgggaatctacacctaatttcactccaatcagatccataagtagtatcaacagatttcaaactgacaacagctctaaaggtgatagtttggatatgtttgctagtaccagtattgctcagatgtctcggatgcaattcaatcctatgtcaaatgtaaccctaactagggaagagatgtgcagagccaacttatcaggggagttattagttcttcacaaacatttccaaaatatctgtactgtgattaaccgttccatgaagagggatgataaaccctatttccgtgttttaagaactctagttcaacgtctatcacgcaagtcatttaccatggatcatttaaggaaggtactttggctggctcccaacttgatcagtgtaaagtgggtccttataagtgaatcattcagaaagaaatatcctactgagtacaaagagtctactgacaaggtctacgatattactattaagatccttcgacctgatctttctagctgttacaataaccaggactatgagacagcttgttttctcttcaagactattttatgctgttggtcactgaaatgtgattctgagaacttggttgatttcgatgtccccatggctgaactcccagagaagaccgttaggtccaatttatctaccccaatcagggatactactcccagatttgacacacccatgagaagtgtcacacctagagtatatgatacacccatgcgatctatcacagctagaattaatgatacaccaatgagatctatcacagctagagttaatgatacaccaatgagatctgttacacccatgagaggctatactcctatcagggacactactccagttcgaagtgtgctaaggtctgatttccctatctgcgtcgataacacaccttgcaagacttataagttgaatgacgatgacacatatgaaacatcttccaagaggatgagaacagatagtatttctccaatgtctgttgacctgcttgacacacctggtatgaataggattcgtgagaacattaagaagttagcagagactaatcaaccacctgatcctcagaatgatttgaaattctggattgacatgaggtggtttaccaaaatccttctagaaattatcgttagtgatacttcaccaatcatgaaactcgaatttctagttgatttcatagtcaagtatggctcaaggaaagtaactcaaggtaatcattacatatcatataaacatatttagatcaagttacaagatgggttgacacattgtctgagattgaccctttaattttacacaagggtatatctaaatttgaagactacacaacagttattacaatcaacaaatcagcctccttcgacaatgccctggattacattaataataaaataaaaactcttaaatcattttaatttagttaacaccttttatcccatttatctttatagaatcactactcagacttatcttgtcaattatcaccttaggtgaatcaatgtagtaaatccactcataattatttaatatttatatataacattatttttcatttacacattacttatatattttcatgaacaaaatttttcaaaaaattttccaactaaatttgtctgtttattatcactatattttcacttttttattatttttattaaagtttttattagtttttatttaagaattttattatgattttaatgcgagctttttaattcatgaaattactttagttttcttcttatcatgtcggattacaatttgtccttccttccacaatcgttggggaagtacttgactccatacgttcccttcgctctgggaggcctctctggatgcacctcaaccttgattattcagcctgtagatatgatcaaggttagaatccaagtacttgcatccacacaaaaccgtaatttatcaccttttacagttttttcaaacattttgaagaatgaaggttttttatcattttataaaggactggatgcagcttgcgtcagacagcttttatacacaacgacgagattggggttgttcagaaccacttctgactacctgaagaagaggaacaacaccaacagcataccattttaccaaaaatgtcttctaagtttgttttgtggaggtgttggcgccgttgtcggaaatccggcagatttggcgctggttcgaatgcagtctgacctctccctccccgccgaacacagaaagaattatacgggactatttaacacaatatataaaatagttagggatgagggtctgtttaacctgtggaagggttcgtttcccacagtggttagagctatgagcttgaatttgggaatgttgtcttcctttgaccagacgaaggagtttttggccaaatatttgaaggaaggaaccttgcctcacgtttgcctttctagcgcagtggctgggttcttcgcagtaactcttagccttccgtttgatttcgtgaagacttgcatacagaaggaaagtcagaaaggaacagcctacagtgggatttttgactgtattgtaaaaaattacaagcaaggaggagttccgagattctattcatcctacgctacgtattatgtgcgcgtggctcctcacgcaatgcttacgttgatccttatggatacatttacaaggttacttaagagaagagataccactcaggagaagagggcataatgtttatgtttgtattctatggacatttaaatttaatggctagtgtgttttaaaaatattaaaacattaaggtgttaaaagtttaatttcatagctttcaactaattcacgcttagtatatgttatatgttgtgggtatagcaagtctcgaatggtccttacacacctttcgagaccaagtctatgtgttgcagaagtggcaaccacctgaatttcagggtcagaatccagtaatttatagtacaaactgtccaaattgaagagagaattcctgtgtatcatatcacacttggtcatgatgaccatctcaagcttagaatcgtcgaaagtctttgaactggagactatttcccttagagaccttagagtttccatgtggtctccatcttcagctgcacttataacataagctattatttttgacctataaatatgccttgtgatcttcttcaccatgtccttatcagtattctgagacagtggaggcaagtccatcactcgtatatcaactccatccaaaaactttattaatgcgatgtgaggtcttgttgtagagccttcctctggccctatcctagtcatgtaacttgtaagtgagctaattagtgaagtttttccactatttggtagtccaatgaatgcaacgtcgttaaacagtctcagttctagttctaggtttattgattctcccacttcagctagtctattgtcatgtttcttaaaacacgacggacctagtcctcctctacctccacgagctaccaatagagtctcatctgggtttagaaactggtgcctaaaatttgttaaaattaaattattttaccagaatatgcatcgagttctatcatctcttctgactctttttcttaatatcgaccctaacggtatatttactattgtatctgatgcatggagccctctgctagttccatgagcatctccaccactcttcccctttattacactctccatgtgtataaaatcattaactaggtgtgttgctttaaaatatacacttccgccatgtcctccataccctggcccatttaatttcttggaccttttctgattctctactgggcttcctcctgctccgcccacgcacttcagtcttaaataatctacaaagggcttctgataccttggaaaagactctgcgttccttattgagactagttcagacagggttttcgctacatccttagttatctttgggttcatcacattctcaagtccccgtaacaatgtgtataatgtacaaacctattaagttatactttctaatcatttaattatacaaaactcatattttcaattttatataaatatttataataaatttacataatcttccataatatattacaatccacatctaatatatgtaatgattctacacaagcactacttatacatttgtatgttctcaaactttgttaatttttaaaatattatgtattttgtaaaatatttccctaattgctgtgatttcttaatttctagacatggtttttcaaaatttcctattttcatctcgacatcgcataaccttaggaacatctccttctgtcgcaatttccttaaagttaaacccagaaatctctctaattccttaaaatatttttctggattaaatcttaaatcaaatgataaatcaaatcatatatcaagcggtaaatgtgatttcacttcctgttactcgactaccgctcataactctgataagttaacccatacacccaactcattagctccaggtactacaccaatttcaactttttaacttaaaattgtagaatctgataaaattgaggtctctgattcttctaagcctccctttattgtttttgactctatggctcttactttcgacctcgaccatgctattgcctacaccaaccgtgttttagatgatcccatcagtgacatttctgtttctgagacttccaagtttctcattcctttcccaaactctgatatgcctcgggttctagaagtattgaccaagcctttcaggtattttttcaaaattttaatttatttcttactttttagggagagttatacctatgaacctgccaccactatgattcagctttgtgtagaacgccttgagaatgaccgacttactgaaagtatcataatacacagttattattacctgaatttcactacttttaactgaatttcaccatttttaattgaattttaccattttattttgtttttttatccaataattttattttttagcttttgatattggggatggttttaacaagagggcttattttctgactttacacctttggcttctttacaggagagcactgaaggaggctcctgaggggattctcctgaaaaattatctgcttgagatttgctataacgtttttagggactggttatttgttcggaaggttttctattttttataattttatttattaggttcccgagtatatgtttaatagggagtttcagaacactcagaaccacatgcttaaatttcttcttgagttgaacaaatccagcgaggatgaggacctctaccctttcaggctttctgaaaccatccgcaggtaaattatcaagattaatctggattttattatttagtctaatgtacgagaatctggtttctgaccacactcttgagctgcttgtcaagtacgttttaaggcagtttatgcacgtttccaacattgatagaaggcactttatgaatgcgatgtttttatggtttgtttactctaattttactcttttcagggctgacgttgagcccatttgcaagcctgccaggctcctcaagaggcccatgtaccagctaattaaatacggaggtacacttgaaatctcacttattatttctcaggctacaggggagctgaggttaagaagattgaacctcaagatacaaagaaactatcctaatatcataacacatttatactaaatgttatctagacactagtgcaggccgtcagtctgaaggtatatggctggcagacatactttatgtggtcagtctgacggtatgtatattaaagggagttggatagacggttataagaaaatagtatattgtcaattactataaagcctggtacatactctggtatatgaccggggactaaaaaatgtaattatctagaaagatttgaagtgttaatggatagttagccccggagggctgtttgtgggtgcaccgctcaacccgggagtgtaaggggaaggcaacgcgataagagaatgacgagcaagctcggaaaatctcttaacccaacgaaaaataaccgtgataatacagagtccagttggacccgtatcagctatcacgctgataagaacaggtactacaaattgatcttagccaagaggccgagaaggtatgagccgctcaacgtacccaaagtacccatagtagctcagcactcaatgcgggtggttataattttaccccatcgattaacattaaacttgatattcctcctcattcaagtcgtcaatttgttgaattcctattcctagaatttttaaacataatggatggttggaatacttagtagaatcttaaatgtgtttcttagtttttgtaatattaaatccttctattttgtttaatctagaagatcttcttttcctttatatccacacatttaaacttttgttttcagttaaaaaattaattggttgcttattttactgatttatcttctttaattatttttacgtctaaatgagcctcaccttgcagaaggctactctaactatatatttttaaatctgtatatgtttcattggactataattttgggattctttgtttttattaatcttataacaataattagtttctgaaatctatcttaaattgtatgtttctgacccatatcgcaatcgtgtgtattcctaaccctcagaacaattatatatttatttattccaaatggttaatcttttattattataaatgtgtttataatctgatgtgacttatatttaaatgaacataccctatatgtaaactccctattccttaccaagaataggtagtctgatttttttgtgtaaaatatattttattttaaatgtaggattttgtaatattatttgttttaattatttgcctcgataaattgttttgtaagttcgccctttctctcagtaccactcagttcagttttacaattgacaattgattcataatgcatttaagtttgtaaaatattaatagtttcagtaaacaaagtgtgtgcattgcttaaataatgctgtgtatagatttagaaattaaataaatctaacctcctcgatatgcgaccatggccgtagataacatgttaacgtcaccccttttggacgaagattcctcttcttatgacacttcattctcatccagtagtatatcgcagacagaccgactgatcttgtcagctgatgactctatcgaatccttgatagatcacggtcgcccagagttaaataatgtagatacctcaacgatatgtaaaaattatttctacggccaactggcaaatgtaatgaaatcagcaatttggtggagtatgattggagtactgatcaaaaacttcacctcttcatactatggcttatcagttacgcgttcaatttttaatttgtctctagttctagggtccttcatatcgaatttaattgcagaagttagaattagttaattttcattaaaacatgaattaacattattttcaggttgttaacattagaaagctgctgtgttttactactttgtgcagattaatgatatggtcagttctagtccctctgttctacacactgtcatgtaagtacttttaaggctgaaattaatttttcagatttatatgacaagatgaactattattggatattctttgtgagtctgatgcttgttgatggcttccagatatccctgtccaacaccgttgacctagactatgaaggaattgacaggatgtcgcaccagtacaacatcctgatcccagataacctgcaccagtatatgaacaatgtctaccaactagtgtttgacttctctttcatcttgatatcagtcccaatctcaatcataatatttctaatagatagattcacgtcctttgacagtaagtttctttcaaccattaaataatttttagacaagttcgtgcttctatttgtttttaacgtgacttttatgattttatcgctggcttcgctgtccttttacatcttcgggatgccaataatacggtccaccaactacttggcgtactctaggaacataaacctgacttttttctcagttatggaggagttctgcagcaagctccgccatgtcaaggacggatttaggataatatactccaggcagtacttgttcaggaatcttttgtatttctccttcgaaacatcttacgaaaactccatctttctcctcatcatacccctcatatgtaatttctcagttaacattatttatatatagcgaatcaaatttactaaatctttctttaggttataataacatttggtttggagacatgaacatctgtggaattaacttgtttgcagtgtgtctgatatcgatgtgtaagctggggacaagcatatatgggatctacgtgacgtacaaaatcaaaaacaacgcgaaccataacctgtacatttctaggaagaacactattcttaggtaactttatatttaccaaccttactaaatggcgtaaaagttcatgtaaatatttatttatgtaaatttctgtaaattttccgtaaatatttattttataaaaacaattttttagatgtttggttttcagtagtttgagcatactgttgttgcctggagtgttgttagttcaaaggtactgtcccatcaagtgggtttcgctggctgtcttggtcctggggttgtttttgttcttcaccttcacgactctccccaagatcaactactcgtcaatactccagtacaacatttccaaccatccgctgtcttacaagctgttcgactttgtggggacgttcataacgctggttgacgctctcgtcatatactcgctctcctacgtgttcaggcttccaaacgacgaggtcaccttcagccacatactcacgtatgctggtgccatatacatagtgtatactcttatacaaatcacattagaagtttttaagccactgtaatttagtagtcatactttacatgttagtccaccttccagttcgtcttgtagccgacgtcgtacaagttctttattatagacttgatattatccttgtggttcaagtaaaacctgaagttatatacagtatagttggttttacttgtatagttggtttgtagttgtatagttggtttgtagttgtatacttagtttgtagttgtatacttagtttgtagttgtatacttagttcgtagttgtatacttagttcgtagttgtatagttggtttgtagtatgtatagtgaaaatacttaatagtagttgggtattgtgtgaaattacctgtaaaggtgaagtgaggttttggcgtcctcaatggagttgtgctcggacacctggatcttctggttcagaatatggtacgatagaaactggagagacatgtagcgctttccaggaatccagaaaagctccagggtgtcaatcacattctcactcgggacacaaatgtttaaaatccgaaggtcctgctcgagaccgtggccgataatcttgcagccattatcaataagatatcttaactttaagtatatcatcttctgagttgtcagccagtgcagagaagatttaagctccagatcaccagagcggatcccagaaaatctaaaattttcgttacataaggtggaagtacctcgtgttataatccttgggcggtttattgtttagaatgtagtggtccaaaaacgggatgccatgtaaattatcgtcatttgccctgatggcagtgaccctaaatgcaataattaggtgtttaaaacattacctggctagagagtacaaataattattctcatcctcgttaagtatgaatgatgatttctcattagaggtgtcgttgactggggtgttcttcaggtcagtcttaacatactcaatatcgagagcaaacatgaaactagactcctggatcaaatttaactcatggattgaaataggagtgaacgtcttaatcttattatgagccagaggattatgcgcaatgttgtgttcagagagtagaatatatggtggaactgggatactcttggtgggacatggcagtggaactaatctgttcttaattgaaattatgttgttttctacgtttgcgcagggtattatttcttctattccgttaaaattttcgttatgatccttatcatcatcgctttgttctgtgctgttcttggtgtaaatggcaaagaggagaattttccaatttttcgtaaagttgaacacgtcgtcattgtcatctacatacattacaattccatcatttattagaatccagttgtactcctccgtctggaaataatatttagtaatttgacaaaagacatttgaattgtaagtgggtgagtaattagataatttgttaataagtaattaaataattgaataactaaataaccaggtagataagaagtaccttgtattttggtggtaatttaatacatgctagggacctatagtgcagattctctggtggtagtgtgaagtaaaagcactcgagggtgtatttgtgatcgttgaaatccatttccctgggaatgttctcgactctgtagttaatgaagtcgattataaggatgttgggactgctcaagtactcaacgtcaactatacactcaactactttgttacagtccttacagaagtccattgaaatgttatcagattgagtcgtgtcacttttgggagtgtcagtaatctcataatagtccacacagtagtttcccacattaacaaccacgtttacgtgattgtagctcagacatctactaaaagtcttcttcgaaaaggaaaacaggtcctttattaagctggttgtgaccttaagattatttttgttatagtagttgtgcatctcagtactcatcttctcaagtacccatagaaatagatgtattggggttttcagagttggttggttctcaataagcatgagttcctgaagctgagttacatacaggagattgtttgaaaacttcctaatcttactgtcagaggtcgtatctttactagtttccttattattatcataataaacctgcagattatgaagtccgaatccaatttggcaagttatacagttactaagctcacaaatgtggtactggattgaggacagtttggggagaaaaaagaacatttggacaaaaatgtgtgcgacatccccgtcaaatgtaccaaccattgaggcgaagggtgtgttgttgaattctcgactttgtgatattgggatttctgacaaattacggggtagattctcacgattgaatccgaaatcctccttaagctcatttggaaatctcagtgactcaaaattgtatgacgagtcactcatgaatacgtccagggtatcacctgctgagttaccaactactcctagaccgtactgcaaacaggaattcatggtttgttctcgggccattttatactcgagagtactgatttttaagtcaaagatgttaccgtcaggtgaaagcgcaaatagcctatcacttttggggactatgaaaaccctcgaaagtggtctgtgaaagatcattgaaaagctcttcatcattcttatgtcatagaggcagagtacagggtcaaagagagtcatacaacctgaacaagaggagctttgggcgttgtactggtatgggtaccaatatgggtttggtaagggttgcaaagtgcaggatgtagttgctatggtgttgttagaggctgaaattgagtaaactgggttactgtgtgaggagactgaggagactatcctgttaatcctgttgtcaacaacatgtaaaattcctgaacatgttcctatacacgtcgaatcaacgaagtcgttttgtaaagtatttgagggcttcatctcactcaggatacactccaaagttatagcgccattcgccctctcaacaaatgctttagttggaggaactctgttgctggtaaatccagtaccatatgtgcagaaattatcaggtttataaccaaatgattgtgatgggtaatatccattaggattattttgctcataagaattttgattacttaagctagtaaaggaataactcgaggggacgaattctgggattgaactaatatcgccgtacttttcagcgatggtcctaaaactaaacgctggtttatccccatgtgatggtgaatcattagaagtacttggagtgtactgctcacaacttggatcctggttcttataatctgaaggatattgagcactggtgtaatcagttgtttcgtaggttggatactcaggttgataggaatagtaacaataactgctggactggtttgacatgaaatcagatattgatgttattttatccctatattccaaggtcgagttttcaatttgtgcgttcagcttcgactttacttgtcctttaaatgggtcaataaaaaacaactcgtctgagttgtttgaaagaactatttttgggtcatttttgctagttgggaaaagggcacaggaaatgtgcctggtattgccatatgttatttcctccttagctggtgagcatagcactttcatagacctgtatccatccttagaaaccacgaacaaatccttagatttgcctaccaacaaatattcctcgtaaacagccagagagtgtattgagttgtcgaaacaaccgcaataacaattaaaatcatctgaaacggagtagggtcctgtgttttgagggagactatgtatgtgtttaatagacttgtcctcggggtttagaccgattaaagagcctgatatgttatatgttacagaaccagagatggagttgtatatccaaattaagtcgttccattcatcatactttaaaaacccgtattgcatttttagaaattaaaatttttagtattctgaccaattatcagactttgttgtggttagggtttgtattttaaatattatacagttcatggtttatttaaaatgtgaagtatcacttcaaaataccaataattgacacgtatactggttttaaataacgaaatttaaatttttgacagaaatcattaaaaacttttaatgaaaccaacacgaaattaaaattaggcagggattgaaattttcatacttataaaaatagatattgaaatgtaaattttatgaaaaaattagtaaatatttcaaaaataaatactcatgtttaagtggctataaacaattaaaatatgagtataaaaaataatattatacaagacaatgtatgtcatttgtgttcactgtcacacattccccattcatcggtgaaaaaaactaattgtattaatgcatttcccttcatatttatcaggatgttgtaattttaataagtctttttaatgtccaaattttagccttaaattatctcctcatttcaccaatgaggactgtgtaaccttcaatgagattctgtaaaatatcttactaaacaaagatggttttcgaagtttatggtctcacgtttgccggaaaacctcttttttcaaggttcgcttttaattatttaattatctttacatgtgtcgattattgtcccttgattctatacacaatttctctagtcggaaggaatcagaggtttctttgacattctatggtatgttacagtttttcccataaaatttactaggaactatctctgctatcgcttctaaagtctcaagcttactctcagactattcagaacaagattctttacgctatgtaactgttggtaaattacactttacatatcttgagagaggccctttgtgctacttctcaatatcagataacggttactcacctttgatggtctacaagattctgtgcgttattcatctacaggtactttttataccttaatttttatgccataaattttttataccttaatttttataacaaaatttttatactataaatttttaccaggttgtatcgatattgacgagaggagttgaacgcatattgttaaaaaggccatcctacgatgtccagaatttactaggcggaacccagaatattattgacaagttgatggataacatgagtggttgcttgggactaattgaaggttatgcatatgaagcacttccactatcacaaattactcggaacctcttaacttcatattttactaaattcagaaccgataacataatgtgtgagatttgaattttattaatttttagatgttgttttatagtagtgtcaaacagagtagcaatggttaccatgtcaaagactatgactttagtcccaatgggtttgcttagctataattatagttaatgatttagatatttctaccgttatcaatacactaatcgcatcgcaatcgcttcaacagcaggaaagctggacacctatatgtttaccatcatttaatgaccagtgagtcatgaataacttgactaatttatagagcattcacttacggatatgtgaattatattgagccagaaataggcattgtttgtatatcaacatcgggagagcaggagcagttttataatatttctaggcatttggaggattcaaaacgtctaatgacagagtctaaatgcctagacgacttgagatcgtcactacttgcaacgcctttggagttcccctcagggggtgatttatcatgtgaaatattacacctgatgttttattccaagaaattaggccagttcttctcctcttcatttaagaccagttccattggaaatatgactagatatataatctcctcatacagatcagttgttgaatttctgtacaactcagactacagaaagtctgcactattttcatacgaagtttgatttagccaataatttatatttattctagttatattcagtaatatactagttagaattagcatattaatgataattttttagtatttaaatgtttatgtcgagtacagcaacgactataatatatacttggccacggttccgtggacagagataacaaccgagttcataaacaaaatcgtttcatatgttaacaagcattttaactttctatttattactaaaatacctcagatatccaaaagggactaatattttaattattttatacacatcatatcattattactaaggtgtatatacaattgggtagaaaggtgtatgtacaattgaatataaaagtgtatgcacaattgtatatacaagttaatacaatacaacagcatataaaagtacatatacagatgaatataaaagtgtatatacaagtgaatataaaaatatagtatataaatttatttaataaattatcgtgttgtatcatcagttttggactttaaattaaatgaatttacaatttgtctgaaatatccagtcttgttccaaagctcaacaggcgttcccatttcaacaattttccccttgtggaaaacaacgatttcatcagcgattaacattgaagacaatctgtgtgcgatcataactgtggttttattagagcccatttctttaaatgtctaaaaataaacatgaaaaattaaaatgaaaaaatgaaacattaaaatgaaaattgaaaggtgaaaaaatacctttatgatttgtgactcagccttaaagtctagtgaacttgtggcttcatcgaaaagtagtatttgaggatcttttaaaaaacaacgagcgattccaattctctgcttctcacctccgcttaacatcattcctctttcaccaacgatcgtatcgtatccatcagggaaactcatgatggtatcatggataccagccagtttggcagctctctaaaaatttttaattttacttttaaaaataactaaacttaccataacatcatctagtgaggcgtcaggttttccgtatgaaatgttaaaggcaattgattcattaaacagaaccacgtcctgaggtacgattcccaaagtgtttctaaaatttttgtgaaatcatcgttacaaaattaaaattataaatttaaggttataaataatggcgaaattacctcaacgacttcagggttacattctttatatcctggtcgtctatcagaattgaaccagaattagggtcatagaaccggaacaacaatttaaaaattgtgctcttaccggagcctgaatctccgacaattgctacagttttacctggggggattgttaatgaaaagtcgtcaagaattatgtgagggtcggtttctgtgctcgggtagaagtagttaacgttcttgaactctattttaccctgagatagagcaagatccttggcatcaggtagttcgtaaaccttaggtttcactcccacaaggtctagaaacttctgcaaatcaatgaaactgagtttaacctcccggtacattgtgccgatcatgttaagagggactccgatttggaacagaagagtgttaacaatgataaagttatcgaactgggctagtccctttgtaatatccccaagtgttaaaaaaagcgataggaacaaaccacagttgaaaataaactgttgcccaaagtttaggaaagctaggcttttttggacatccactgaatgcttctcgtagtccatttgttgatttgagtaacgttccagctccttaatttgtgcgttatagtatctaacggcttcagcgttggtaatggagtccaggaataagccagatgcttttctgtctgcatcagccatctcttttctgattatcatcctccgtttagtaacaaaagtagtgaataaaaggtataatacaactgttagtgatgttattgttgcaatcataggcccaaccttgtaacagagcaatgctgtaactagcgaaaattcaagaattactggaacaacttggaaaacagtgattctcaagatctgtgaaattgctcttattcctctagaaaataccgctgacacctcaccagactttgactggattaaaaagtccacatccaggttatgtatgttcatgaacattttagaggcgttttctcttgcggagcgttcagttactgtgctaaacagtgagttcctgagctcgttaaacagcgaggatgaaatctttgaaaatacgaaaccaaatagatacacgtaaggaatgaacatctcgggaaaagatacaccaaccatttgaagcttaggtattattccaaaagaatcggtaggggcttttactatggagttaattagggaggatagaaacagtgggactgatattagagacagctttgcagataacaagaataccatactgaacagaattctcacctttgatcttgtatcagtgggccacaacagtttcataatcttagatattccatatttccttgtaggcaacttatctaggtttgatgagaaaaacctacataggttcctatttaagtgtaaggttgttgatggcagtagaagacttgtataatctggtttgagtcctttaaattgtggcccaaatgtcttaaaatcattttgtataaatgaattcccattagttttatttaaagtgtgataattgtgtaacttaaaatcagttttaataataaatttcacattgcgatggtaaaatcttccagaatagtggagatttccacaataaaagtttgtaaaaacaatcgagagtctgttgtcatatgttttaatacacttgtagagcttatcagggaaatacatgttacttattaataatacagctaatagtacattttataaaaaaatctatgtaaataatgagaaatgacatggttgtttaaaatttaattaaatacaaggaaaatataataaatatgatacaataattgacaaatatctataatataaattataggtggcgataggaaggttggggatttttaactagatattgatataaatagatcaataactagtttattaaatttaataaactgatttaaatcaaataatagtaataaatgtaaataaaaaacaattatgaaaaagttattgagtccaaaatagtaaatcgaactggaaaattgagttaaatttaagaaattgaagtttaatcatgataatcacaaaatgtgtatgaaaattaaatttttagtagaaacaaataatagaatcactggaaggatctggatacacattagatgaaccacccaatatggaaacccaacacgaagccatgataacgatcataaaacatttactttagttgccatagcatttgcatggtggcttataaccctaaacctacgtgagttatgcaatttcatcacataagatgcgagttcatagctcattatcgcctcgcgagatcctaaacgttgaactgtgtgtttctaatttttcagaaacacaagtacaattcttcgtttatttaaaacgtatgtttcaaatctagtacagtgtcaaaaggcagaaagattcctgtaatttttcgccagtgagttcggctcggctgtatgaaacatacatcccttttttagggtaacaaataagtaaatgtgcaatatatttagactaagtccttgcttttttctaacaattgtttaactttctcataatcaactgcgtttaacgattccagagatttgagttctctatccaggagcttggagaccgcagccaactctccaccagtaaatgcgttgctaatgaatcatttgaggttttaacacttacgagtgtttctgaagaattaggaagactagtgtacacgatagttcggtgaattgaatccctaaaataattataacttagtataaataccgttattttcagggtcaagaggtaaaagcatatttaatattttgtagggatttaatgtcgccattatcagtttactagccttgtctagtgatatgaagtggttgaatagaaggatagccctttctctagtctttagattactactttcaagagaatccttcaagtagcctagtccacccagtgtaacaaaaagctgctctgctctcctgcagtttctaattgacgaagatatggcagttataagcttgggttcgaggtcagtgtcctttaacttagcctttagtttcagaagatttggaaccagctgggtcttggaggcgtcctccagcacagactcgttgtttgagaatgaacatgaaataatcttgaatttatatgtattaaacttacagagagggttgctgataacacctctagatcatcactctttagtaaaagtgtgaatgactctaggagcccttggcgtgcaagacttgtagcgttgctagggtgttcttcaaagtgttcctctagtttatctagagattccaatagaacctttttgtcaaactcgacacctttgctcttatcttctgcattttctgaagttgcaaatgccttagagatcctgttaacttcagaaactgagtttgcaatctctttctcgtgttcatttactgaagccatggcgccttcaagaaactccatgtcctccttagacattttcttcacttcctcatctgtaatatttttgtatatttatagagagttgttccaaacctttccttttggggtcgacctttgagagtgaccattttaagaggcccttccagttaggtagagacatttcttggcttatgataacgagtcgagatagtccagcaaatctgaagaatcagttatagttataagtgtggatgtatattaatagagtaaatagttgttacctttgttttttcttagtttagaaactcctaattgcaagaaacggttagcctcggagtgtttttgaggcttatctagaaatttattaatagttaaatttatgtttatattagaacaagaattaaaatcttaccaaagtcggaagtacgattgactagttcctgaagcaggtcgttgtggagctcaacagaacttttataaagtgaaatctcttctaagttaagtccagaggccaagtacctttttctcaaatccttccagtcagagagagtttgttcagacttagaaatattcaaaagatcagcgactaaacagaaattataataaatatgataaattaggtagattgttgttgttttgtacaaattcttaaatgtgtaagaaaaatgatagtataatccaataaataagtgattgcctgagagtttattaaaatgtgaaaggaagtcctttggattaattaaatttgtgggtccaataacgaaggaatcaagaattggtataaacgatgagaagaagttgccaacgttaatggaaataccacgcatatcatttacaaaccttgaactaaaattaaatattttaaataaacgaattactaaggcaataaatactgcaaacgaaaaatatcgtcaagttgttcccccgagcttacgtacaaacatgaaacgtgatgccctagctcattaagttgttcagtcaacgaatcattcattaatgaaacataaatgagttttaaaaggataactagaaatataaaatgtatataataaataaggtgtaacaattagtgataggaggtaaggctgagtgtcactctaaatggcataccatatgtataatgggcataaaagttaaaaaaaaatgggttttacacttctcgatttgagcgtgtcatccttgcgcaggggccatgctaatcttctctgtattgttccaattttttctgatggcgctccgaagaggccagtatatatatgacacaaaatgagcggagtgagactggaaggtataaaagtgtaaaaatggggaaccgaaatagttgactacaaaaccaagttaaacagaaacaaaatggtataaagaaaatgaattgtaattttagaaggattaagacgttgtataaagggaaggaatccagaatgtcaaatcaaatgatagagaatagtataaaaggaaaagaatttgaagtgagaatattaaatgtattattaaaaataagttttaaaattaataaaatgtaataaaattggaaaaaacaggcaaaatagtaggtaatatatcaaggatgttgctaatgattgtacagtaatttaaatgggattctatataataatgaacatagaattagattgttgttatataaaaaagaattatcaagtaataagatagctgataagtaaataagggacaatgtgagtctaaattgtgattacataatgtagggatatacaattaattttttaaataattattattgatattttaatattttgatttaattttaacccatttgtgatctattggtggtatgtgatgtaagtgtgtttcaattttcacgggattccatgatgaagattacaaatgtatcatagtttcccgtaaaatattttttaatttcataatatttaatcttccaatagctggaaataattctagtttctgtgataaatcgcatcagtgccatataagttcagtgtatgtgaccttacatggttcttaacaaaatattattgtgtatataattttttaaattttaaatcgttccaattaattttaataaataagttttgatatttttgacgttattttctaaattttttggggtgcacaatccatgattatcacattgtgccaagtgaatgtgtgctagcaaactgatctatattacgaatttatcaaagcaacttcccatctatccacagtaatttaatgtattttaaacaggaagtgcataatttgaacaattttaatttttcgaaagtatttatcgtaatgtgttcaaagctaactgaggaattttaataatttgtttagtttttgtcgatattaaattctaaaatctgttttatttattattttttcagccgagtgagaatcgaaaccaattttgactgagaatggtatcggatgtgtagaatgatttttaatgtagtagcaatcgagcaaatttgagcgtattttgagttttcctgcttcggatttcaatttttcagtaaatgtagttttattcataagttttaaatgcagttttataatggttggaggtcttgaacccagcgaaaattcggatatcgtcccctcgccagtcatcgaggaactggaggggacctcaagaccagccataaagagaaaacccaatgtcagaagtgttttatcagagagctttaagtatcgtcataatataaatttatacagagtaaggaagcaccaaaaacacggtcatcagaacttgccaagagatatgagccaggttccaaataaccccaatgatcatcagaacatcgagcacattatcatttcagacgacgatcagaaggatgtgaacaaacctgaggataaaggtgagatggacggcttgaatgacgagactgatgttccactggatcaaaacgaggtggaaatgagttgtacacctaaaccaaacgcagttaatcaatacatgtattcttctaattctacaacgaatacaagcaacgcaacaaataatgcagttcacaatgatattttaaatgtagttaacaatcaagttactggaatcaccaactctggaggtggaaccagattagttagaaaggagataacgaaactgggcagactagagctcttaagtaacattgagagttacgttcacgtgaacttctcaaattatcgtcagttctacgacagagtgggcccaataagactcacaagtcctctcagtgagggccttaagagtaaccatgtggatattagtctttggaacgacccagggacccagcttatatcccaaaactcatccaagaggaaagtctacaacatcttttggctccctaaaatcttttcaaacatcgccctgagagccgccattaagcttgtggaggactgtaacataagggacgggaggagtattaagagagagattgagtgtcacctgtacatgtaccagaggtttcaggccttttcaaggtccaagaactcttcctctttaatactccaggatgactggccgacagttgagattctaggctactacctggacaagaaagatcccggccaatcagtattaatttcgaggaaactgacaggtaaaatttatttaattgatataattaattgagagttaatattaatttttagggcccgacttcttttacattataaggtctgagaacaacagcagcttcgcaaagaagataaccccaatttacgagtttaacaagctggattggtgtatcacagcccttaacaggatagcacagttcggctctgttggaatacgccacaacgacatcaagccagacaacatagtcctcgacgtctactttgaccaaggtgtcaagaaagttgatgttaaagttattgatttgggtaacttttagataaatcccttttatagctaattgatttagtataattgattcaactaaaatcaatgtattactgacaaaataattgtgtaggagctgccagtatggagtttactaaagagtttacaggaggaacgccatggtatgagtcgccagagcagaaacttctggaatattacactaaaaagaacagaaataatgaaatggcgagtaaagttaccattgatgttagcagtgatgcctggggagcagggctgtcaattgtagaagttttaacagggaagagagtagtagattacattaagcagccgtacgggatagggttgttgaactttaagggagtaccagctgactcaaacccatttacagactccaatggtgagaatattggagttaattatctgtggtggaacgtggatgagtactgggaagtaagtcctgaggtgtgggtacaggaagctaaaaaggtgcttggattaacctgcaccaaatgcagtcctgtaaacggagcagagtcctataacaacacaggagaactctatgaaaacatccaaattacccagagaacgaattttgatacgagtactggaagggatggaagagacgagtttcatgagttttattattgtaacatttgcaactcaagattcgatgggaatgtcaaggaaaacatctgcaaaacggtcgcaagatacgtgtttaacagcctggttgttatagacccgaagaagaggaaaaacgtgcaggaagtgtcaaaccagctgaggctatttgtaacaaaggcaatatcatactacttgtagaggcttaatttgttaaaattattacctaatattttaaataagctgtaatatggtgaaattttaaatttatatgtttatgtacggaagtttagggcgaagtaggagcagagtggtgagggttagagaatgataaaaatagtaaaagaatatgagattctttaactaaaaaataaactaacgaggtttaaaaataatttaaactaaaaataaattataaagaagagttaaaaatggatgtaaaatagactttcaaatagtagccatattgggtgtaatggtaacattcgaaatttcatacataataatgtaacatttttttaaaaaatgaccattggtaatttcagttatatgcctgaatccagtgagtctataaactccctccgtacggattcgcaaatgataaaccaccaaatctcaatcgtatcaacctctaggccggtggtttcacaaatacagcaaaatagtgaaaaaatattaccacatttgttgcaccaactgattttagatttgtcgataccagaaaagagagagtatgccctaatagaactgagtaagcagcgtgaaaactaccctgatttggcaattctactttggcactcattcggtactgtagcaactcttttatatgaaattgtttctgtatagtaagttttctattattttaaccaataactgtagccattatttatatccgctaactatttcaatggctgactcgacgaaggcatcgaactctttatcgcttttacaatgtatcgcatcacatccacagacgagacatcattttctaagtggtaacttaaatttcttgttattttacctcagctcacattcctttatttttgtatccatttctaaacactgcgtcaaagagcagaagaatagagtacctcaagcttacgtgccttggggttataggagcactcgtaaaggttttaaatataaaattatatgccctttagagtgatgatgaagaagtcatagtttttttactcgaaactgaaattattcctctgtgcctgcgaataatggagacaggctctgacatttcaaagacggtaaaattttaaacaatatatctatatataagttgttataatggtagatggttaattatgtctataactttctaaatataccagtttcacgaaataaattaattttaggtgtcgatttttatagttcagaagatactcatggacgaccgaggtctcgcctacgtttgcgcaaccgcggagcgtttctatgcagtaacttccgtgttaaataacatggtcatgggcctgctggaaagcccatcgagaagaatcctgaagcatatcgtaaggtcatatttgcgtctatcggacaacacgagggcgcgggacgctctccgtaaatgcctgccggaacccttgaggaaaatgtaagttcccacgtgttaacaatgtctcagtgatccatcattttatccatgccttaaggaggagccgatgctcaagaagtggcttctgcaactcatatgtaacacggagcccattgacgagaatcatccaatgtaacttttaaaatgtactaatatttcatgtattaaattatttatggattaatgtgattttacattttaaaccattttgcgtgtgaatgatgaatttattgaggagaaagtccccagtagaacttaagagctgaacttggaactattgcacttgctacatttgacgtagtcaccgatttgatatattgaaactgattggcaattaatacaagttacctttataccagattcgtgtcgacttcgttttttcctgtgattgctaatcgagtagtttttgttagaaatgaccgtgaattgtatagagttagaattgctcctcgaatgtgattttttgtcatggcttttaggtgaatttggcccagaaattttatgttttttattttcctccatttcataacaaaaactactgactgaatccaatgactccacgacaccactatgaagacaggtacttggacaaaattttcgacataaaccacacatttataaaataattgcatgaaaataataagtaacaaaaatacgtaaaattatacatcaaattaaacttgaaaagttcgaataccggaacattcaagaattacccgttggctgtagtcgaccaaactacattaataccattttttaagctttatttacagaatcttttttatgaacgtaaccaaattagagatacccccttatattatacaatataaggactgctgaagcagaaaaaatcacaacgaatgctagtgatccaaaagtcagtgagtagtttaaaactttcttatccttaataatttgtttactaaccattaattaatcaataataatactaaattcattcatagtcaaggtcgtcatcgtcgtcattggttgtggcttcttggtactgttggtactctgaaaccaggtcgttcatgttagattctgcttctgtaaattccatctcgtccataccctctcctgtataccaatgcaagaaggcctttctcctgaacatggccgtaaattgctcagaaaccctcttgaacatatcttggattgccgtcgagttaccgacgaaggtaactgacatcttaagtccctttggtgggatgtcacaaacactggacttggtgttgtgtgggatccactcgacgaagtagctgctgttcttgttctgaacattgctcatctgctcgtcgacttccttggtgctcattcttcctctgaacatggcgcatgctgtcaagtagcggcctcttcttgggtcactggcgcacatcatattcttggcgtcgaacatctgctgggtgagctctgcgacggtgagtgctctgtattgctggcttcctctgctggtgagtggtgcgaaaccaatcatgaagaagtggagccttgggaatgggatcaagttgacagccagtttacgtaaatcggagtttagttgtcctgggaacctgagtgagcaggtgacaccactcattgcggctgaaacgagatgatttaagtctccgtaggttggagtggtgagcttcagggttctgaagcaaatgtcgtacaaggcctcgttatctatgacctggacctcgtcactgttctcgacgagttggtgaactgagagtgttgcgttgtagggctcgacgacagtgtcactgaccttgggacttgggaatactgaaaaggtctccatgattctgtctgggaactcttctctgatcttgctgatcaatagtgttcccatacctgatccggtacctcctccaagtgagtgtgttacttggaatccttgtaagcagtcacagttctctgcctcctttctcacgacatctaagactgagtcgacaagctcagctccctctgtgtagtgacccttggcccagttgtttcctgctccagattgtccgaagacgaagttgtctggcctgaagagctcgccgtaggtgcctgatcttaccgagtccatagtaccgggctctagatccaccaaaactgctcttggtacatatcttcctccggtggcttcgttgtagaagacgtcaatccgctccaactgaaggtctgagtcaccgtggtatataccgctctaaaaacataaattagtaaaacggatgtatgtaaattcttatgaatattgtttatagtaataaaagaatatatggttcaatcatgatatgtacatatttaacgttaggtatctatatagtaattagaagaatggttaattatagtaagatcagcttacggaatctatgccatgctcgtcagatatgacttcccaaaatttggcaccaatttggttaccacattgaccagcttgaatgtgtacgatctctctcatcctatagaagagtttataaaaacaactatgatttgaaaaatgtttaaaaaataagtttattataatccaatatgattaaaattttataaattaaaactattgaaactaaatcaaagatttaaaaaataataccacacacagacaacaccaaataaaaaaaattgtgacgttccccttatatggacgtaaaattttttaattttaaaattggtttagcatagcagagattgacacattacttataaacagttgtatctaaacatttcacgacgtgtttacgacgtcgcatatatctctggataggacttacgttcaattttagttttgatttacgatttgaaagacttttaaattgtttctaattctagattataagatcgaaattttcttggatcttactggcaaaaactatacttgattgtgcaagtgaataatttttataattagttataatgtaaaatataattaaagatttgtacaatttaaaatgtatgctacagttagtacagaaaaaaagagagacgcgtcacttgataaaaagatcggggaaattttagtacgatgcgacacgcaacaatttgaaattgtgatctaaattatctctgactttatccaggaccttttgaaattttgccttatcctcttttaattgtttctttttaaccttctcaagctcaatatctatttcagaagccggttgtgtaggtagtcgagacctgtcgggagttgcgtccttaagtactttgtaccacttatttaaaacttgtatttcactcttttggagccttaaaattgctagcaaaatatctgatttgtttaatacaggctgtttccttttctgtgtttccggattctcgtccaaatattcgtcatattcatccaggaagaggttggtgtcgtagtaggatccgtcatcattatgcattttcagctcccttttcagctccttttccagatccttttcaatctttttcattaacttcgccttatcaacgtcactaagcttcttttttttaatcatttctaagtcttcttttggaacatcttcgattcccgagagtattgagtgtcccataataatgtacgatctgtcgctaagaccaggtggccctactctaatttgatctcctggtgataattgatagtatttctcgggtataagtttcatatggttcagagttgttccatattttgagtttagatcgtaaattacaagactgttacttcttgtgtaatgaagtacacagtgtttccttgatacgtagggacttttatacacaaaatcacagtcatctgatgatccaagaatgtaatgagaccttgaaccaaggttaactatttctaaaagaactccatctgagattatttcaatagaaatatcaagaatcttacggtctgttgagctggatgaccatctgggaggtttataaatcaaatttgacttaaaatcatcccctattttattataactcattggcaattcattttcaagaagtctccactcatctgagttacctgtagtgtccttgttctcatgctgatcaccctcagtattaacagagttagagccttctttggaattacacattaaataggatgaaaatatatatttaatatattaattaaccgtcataatctgaatttaatagcgataactttttaatttttgatctgagctcccccatcttggttctcagttgttcattttccgagatcattttttcgtaatctttcagaacacatttagattgtttttcaagccgattcttctcagcaacttgattatttaattgatcatgtaaacttgcattttcctttgtcaacaagcttagtttctcgtttaatgatgcgttcctgctgaacagttccatatataatccttgattttcattattacttgtttcaggatccgaaaatccggaagctgaagtggtttgtcttgaaataagtttgctggttccaggatgtctggaagtatcttcgtgcaccttcattctagaagattctgaaccagacttaagggattcttctgcgatttgctcctggaacacttgaattgtgttcttcatttcaagctctagaaagcttttttcttgttttgatctttcgagttcgcgttcaagtcttgagttttccaaaattaaattcgacaaatccaccgactgtcgctgaatcagagaatttaagctaaaggttttcttgtttactattaggtccagtctcccatctcttgttagctcagtttgattgttttcaaagcaattgtttagtagcactctactgtgaaacactctaatcatcaagaccacagagtctctttgactcttgttatacacccttagtgagtatttcaaactttgatcaaattcaacgtaaaacttaagttcatcctcaaaatctaaggttacccttgggtaatctgttccaaatctgcacttggttctaaaattaaaagctaaattatcctctggcttaagcaccaactcctcctcaagcaaataaagtacaaaatgtctatagtctgagcctgcggataccttttcagagttcacgtcaaccaggtaaagctgatgtcttgatgtgttatttataagtgactcctgtatcaacctcttagatctcacatcaatatctattggacccacttcagcctcagcttcttcatcagaccctcttaaactacactttacggcgattgttgtgcccacatcatcagctgtgagcttatacgtaggaccagaaacatggtccaaatgccactcatacgagtataggacccgtctccatgtgaaatcacacaaggatacatccacacctgttactgaaacagataaaactcctaaatcttgtggaagtaaattcacttcaaacccgaatttatagtttccagatgttttcacttgagtttgtctcaatgtgttggagttgggctcctgaaacagcgaacagttgatttcgttggttaatctgccacaaaacggtgtttttaaattatcaaaatttgaaacaagttcatttgtagcctgttttgcgtgaaatttgagttgagcgccaacttcttgtaacgcacatgtcacatgcgtaccgagttttttaaatacatcactgtgtgtttccatttacattgtaattaattaaaaataatatatgatagataaaatagaagttataaaatttaaaatgtgtgttgtgggtagacgctactagtcactttaatcatcgtccaactcgaaatcactctcatcgtcatctggaatttcaaattcactttcgtcatcgtcttctataattttctttggttttttagctctcctaggaggttttggaggtgtggaatcctcatctgagcttaaaatcaccttacttgatattttccttttaatacttgttgatcgtttacctgaattactgcttgaggattttgcaggggtctttgttgctggttttggtataggttttctagtaggtgttttttcatcctcatctggcttaattatactagttaatacatcactattgtactttttacttagcctatcaaggagggatgtgctgtacttttcaagtggattggcctccttctcagtggtttgcgatgagaattccgggttaacttgcgacgactcttcctgattatactgtgttaattcttcagggttaacttgagaaaactccaattgagataattggaaattatcatcaaattgtgatgacccgtacacttcatcacttttttccatatccacatcatcaagttcagtgagttcaaatatatccacctgaggaactgagctgttgagtttaatcccaccagtcgatggacgatcaccattcaatgatggagcaccatttactagtgggacagaatttaattttgtatcaccatttaagggtggaattccgttagttacatggacactttctggaattataggttctggttgtattttaactcttttctcatagggcctatactggtttgtctgaatgagttgatccttcagaacacttaggtccttcttgtacagttgaattggggttgtgttaatgagttccttgagtagaacctgcttggaattgtattcgttgttcagcttattgatatgatcaagtgttaaacttaagagtgacattttaaggagatagttgaacccttcaatatcattgtcttcttcatcctcttcctcctcttgtttgtaagtgttgaaattaagtcttttcagctcacttacaatttgtttttttgattttctaaaaatcacaagttcgttgtttatgatcatatttataaatctaatctggttggacaactgttgtagctgtagctggagttgctttatcatatactccctcctcttactatagtacttaactcttgtggtaatgaaatctttcaaaatatctatcgctccgttgtactttttaattctcttgttacagtcaaagaggatcatattacttgttggaatcgtggttttaagtttaaacaccttttcaatgtcatctgtgatgtcaggcccagagtcgttaagcttgattttaattttaatatcctcgttgctgctatagtctccgtagtctgtaatatacccctcatcttccttattagttaccattatagagtttaggaattcacggtaatcattgatccagcggttaactggcaactcggtgatcacaagttggttcaggctgtggttcaattcatatttacctgtaatatcataacccagcttagtgttcctagttactgttcctttgaagtttctgtaccaagggatcatgtcattcatgtccttgttatctaggaaatttactatattgtcaattacgtcaattggattatagctggggatgtatgtgctaaaaccggttccgataccctcagctccgttaaccaacaccattggtattatgggcaaatagtaatacggttctattatttgcccatcatcattttggtagtcaagtatcgggtcatcttcctgtaggaatatgtaccgtgttagtggtgacagcttcgtgaatatgtaacgtgctgctgctgcgtctttaccaccctctttcctgctaccaaactgtccacatggaaggagtaggttaatgttgtttgagcctacaaagtcctgtgccatgtttacaattgtctgttgtaacgagttttcaccgtggtgataagctgagtgctcagcaatgtatccagtaagttgtgctaccttacactcgttcttcaagttacgcttaaaacagccaaacaaaaccttacgctgtcccggcttgaacccgtcaatcactgatggtatgctacgctcggtatcgtatatgctaaactgtatcaactccttattaatgaagtccgagtaacgtagtttcttaattgagtggtccactgtagtacccaggacgtagttttgcatccacctcttcctatcatcaatcctctttttactaaacgctagatcaatggagtcgtcatccacagtatcaacgtatttaaactccacgatatgcctgtttaaatttccgaaatactccttaaactcattgtcactacttgttcccagcccctataatatgcattataccgtataaattttaagtatctaaataaaataatagttaaaaatactttgtagtatttaattctgtagtttgaaatgtcgactgtttgcttccagttgttgaaatcctcaattgtgaaaaacgagtggacctggttattagacttattggtcactttaataattggggtaatgaactcctttatgaatccgttgaattgtatgagtttaggccaaaagttgtggaacatgttaatcaggagacctttaatgtgtgagccatcatagtcttgatcggtcattatcattatgcttccgtaccgcaagcctgacgaatcttgccttagcttattggtgatgtcaagtcccataatcttaagtatattttgtacttcaatgttctgagttagctgcttgtaagaagcttcacgaacatttaacagcttacccttcaatgggaacacaccgtatttatccctgcctacaaccgacaaacctgccaaacatgatgttttggctgaatctccttctgtcagtatcagtgtacactctgtcgcgtatctcgttccagccttgtttgcatcttcaagctttggtataccaaacaacttatcgttacccttggccaccttcattttcttcttcagctcaatgtttgttttttcgtgcagccaacttagaatgttatcaaaaatcttactcttgaggacttggttgagtgtcttatccgacattgtgtacttactaccaaactttactattttcgtagtcaaagtttcctaaaatttatttataatggaattaattaaatagttacatacaaactaaaaatgttgggatataataccttggtttgtgagtcgaacgatgggtttacgatttgacagttaataaaaacaaagatgtggttcttgatttgatttggctttaactcgattccgcctttattttttgagttaaccttcttggttaaagactgtactaaggggtcgactacatgtgaaacgtgtgttcctcctttaattgtgtttatgctatttacgaatgatacttgtctgaagccatcctctgaggtactgattactacttcccagcggtacattttctcataaattttgacaatttccgtggcgtcctcaggaaggtaaaggttaacatagtccttaaagtcctttacctttatcctttcattgtttaaaaacaccttgactccaagcgtacctgccatatcgtagaccctcttcttcaagaccttgtaggttccttcatccaactcagttaagttgaagcgtgagtagtctggtatgaatgttattttaacgaagtcagggcccatatatgactcgatttgagctggagatttcgtcttggtcatgttatcacaccaggtcattttaaacttcttcttggttttcttgtttcctacaacaacggtaaatgtctttgagaagatattggcgagttttgccccgaaaccgttccttcctccagttacacgctcctctgagtcgtcgtagttatcactcgttaagagctcaccaaaaatcagctgaggcacgtacatcttatgctcattatggatctgtattggtattggctcaccgtcattgtataccactattgctcctgttccacggtctattgtaaccttaatgcaggtcattttttccaaggtagggtcgctcagttgacgtgcgtacacatctgctgcatttaccaagagctcatcgaaaattttatatagacctggcacgtagtctatagtttcgtacaccattctgtttttttcttcgtcgaagacccacatctgctgattattgagctccgtgcttccgatatatgtatcgggtcgaagcaaaatgtgctcgagctgtgtcttcttctggtatcgctcttcaaccgtctttgcctttcccattagtgtatattaaaaattaattgtgtttaaattgataggaggccggtactatactgctttcttaaaattagtgtgtaaatctggatttaaattcaccaaatttagggaaattatgatttaaatttaaaaaatatttgcattttccactgttttacgatcattggactatatagatgctaaaatttaataaaatcctggcttctcaagaatcacaggtaaacattgaaaatttccagtaaaattgtttgttctatctaattatagatttttggaatctaaaacataggaagcacagaactgacaaataatagaaaataaaaaggtgtgcgagccgtaccacataacacacatacgaatggatatatatttaaattgaaaaaaaattaatttaacaatttgctaccattaatttaaatctgctgaaattatccaatttctttaaattttccctctttattataacgtttacaccaactttatccatggaatctggctgagagtgctcctttaccttttccacactagtggcttcattatataaattttttagcaaattagccaataaattcggtttattttcatttgtgtaatagtgaattaaatcaaagcacacgtagcctactcccaaatgcttcaacatcctaagttgtgcgtatttgtgtagttttaacatttttttacttgttttataaaagtcgtcgaatagtaacactattgccatgcgcctattattaatttcaaccgatattggcaactttaaattatttactaaagtatttttgcctagtttaacaattgggtcatgttttgccagaaactcctcaaaatcacttgaaaattccttatatacatccttaaaactaattctcttaaggttatttacataatttaactcatgtgttccaaatatatcgatattttcagagggtgaaccagttaataacatgtttatgtacgacagatcaatattcttcgcattgttttttaaatgttctataataccttcatctatattctttagcgataagaattttagtattgaaacatccagaagcaaatccgctgagtcattttcatccttaacttgatacaggtgttcaagtatgggatctataaactgtaggaatcctaatgatacatatgagtgaaaaaaggtataaatctggttttcagttagattttcacatctacactctattgttgacagtcttctttccaaagctgttgatttaatgccgaaaagagttgataccgctgcgattagtgcaaggtcgcttagtttcattattcttggtgtttttgaaattaaaactgccactagattccttgcatcctcacttacacaattcctctcctttatcttttccagaaccgataataattgtgaaagtgtgtaggtctcccactggtgttctctgctcaacttgtcacataatcttctaaacactaactcaagactatcatctgaacgatccaaaagcttaataaagttaatagagtcaataattgacatttgttttattctgtaaactaattcctccttaattacgttctttaaattatccatctcttcataagttacgaaactaataaggttgctttcttcattcatctgtttggttgtagtgtgtaacacgtgatataggattagtagttcacgtgtttgaaatgataacttattttgtaatatttggttgttcagcttataaaactttaggatgttattatatattctgccatttacattatcttcgtttgaaaaaatgtcttctgtactaaactcactagtgtcaccagtgcatacagaattgaatagcaggtttagataagagcgatataaatataacaagtcagtagggttcattttcaatagcacatcagagcattttgacaagagggttatgataacgtccgatagtatgatttgttcgtaatcatttgcgataatgggagttaatttaggttccaaaggtgagcttaatttttttaccctattaggttgatccctatcctttagaattattaatcgggaatatgaataaagtaaaagggttagtgtgtgagggttttcgatgtacttaattctacttgataaaatgagagagcatttaacaaatatctccttcaggttacaaattctaagctccaataagctatttaaaagaagtgatacatcctaaaaataatacaaatccataattttaccttctcagagatcttgtttgtcaatttctctatcaatactttgtttagactatcaaatacaaactcgttaaaagtggtaagcttcacaagactattgtacaaaactgctatatcccttactgtgtagttggcaacatcgcgaagaactgactaaaagtaattggtttagttacatactactgaaatttacctgtaatagaaagtcgtaaaactgtttattatttcttctcactagagaaaatgaggagaaaattagtgatatatcagttggtgtgaatttgtcaaccttatcaacagcagttttatctttaaaatctggtgaatcagtatatttagtggtcctttcacatacttcatacataaattggttccaaataacgttcattctgagattcttcctggaagcctcctggatttccttccttagttcaaggcacgataaattactgaggcgtttctacacatttgaaaattaataaaatataagtaaaattaagttaccagagtaggagctgaaagaatcctggaggctacaggaagtaaattaaccataaattataaaatatccgatttttggaatattatatacaaatattgtagtcatctcatggaataagtctgaagaaatatagtttataagggtatatgtgcatatattacaataataattgttaatcagtgacaacagatgtgtatgtgattgtaccgcttcgagtggtgaatgggggtaggtattttgaaggtcgaaaagaaggccatccttgcggaaggggcattctcgttgcaagtgacgcctagcggatgcgcgataattgctagttgaaaactactccaattcccgactttcattacgcaagttttgaaagcaatttttgtggcccttaggggctaactattaaaataactcaaatttttctagataatactttatatattcccttatgttttatattttatctatcggtttttatatccatgttatatataaatttagttttgcccttatcttcttactcatgctaccgacggttatgtaccttacatgttatttatgtcagtatatttatatttctatccattcactgatgtgtaattaataagtatatttttgtacattaaaaaatagtaaatggtattatgaataatgctaatgattggtacataaacgccgaaagagatgaggaatatggagatagaacacatctactccagcagtccagagcccttgacgaatcgttaaataatttagcacagtcaagaaggtgagaaataaaagttaacaaaattgatttagtgttttaaacgatacaaatgaactcggcgcaaatgtaatgtccaagttactcaaccaaagagatagtattataagaacaaaacaactggtaaggaaataaatataaaataactaagattaattcatggttagataagcgacacccaaaatatacaacatgaaaccagagatattattacatctatcggaagatcggagttctatacccgagttctcatgtacttcaccgtagtgatgctagttttggcaataattttcattataatttataaaatacttaagaaataagctcggctgtaaacgattttaaatatgataacgcaatacaccatacacataaatttataatattcactttatgttttcattaattttatttggaaaaaatgggacaggaaagaatcccctgtgaatttgacgaatcctactcggaaaggttcgttacggccggagaaggatacaagagtcagtattaccttagaagcatgtcgaagctccaatccatgaaaaaattattgcttgaaaccataaaaacaaaatggtcaaacctaaaaattagtgaatctgatccggaagcctataaattagtggaatccatcaactatgttaaggtgggacaatagtgtgtaattccatttaactataaagtgttaacatgataaatttagggcaagtgtgtagtaatagggacggtttttaagcaaatgaagtatcatccgacacccttggatgaatatatacaaaagtttgatattaaggtgcggaataatcactagttaatgtggaatatgtgtattaggttgaggaaaaatcagaatatacagatgatgaggattacttattcctggaagaccatactcagcgtttaattcttgtaggaaattgcataaaccctcacaaattcgtatccggactggtattttttaccgtcgacacttttattcttaataattcaggtaattgcagttagaggatacatgaatgatgagaataaattcgttactgaggattacacactcccagaaattccagattcattgaccctttacaacataaagcaggaagaggagaagtttatcgcacttataagcggtatttgaccttgataaactagttttttatttaagattagggcttgaaatgagcggaaatgagctaaattacaagagtttgttactgttgcagaactttttacttggagaaaggtatttattaaatatttttttacacatttttagtaatagtgaatacaacaaaagactagtaagactagtagtggcagggaatggaattgggagatgtgatactgagtgagatttcctaaatttagttattattcactaatgagattagattgagctgattaatatattaataggtctttgaaaaaatctgacctgttctacgcacaattggcatctacaattaacgtcgatcttatgccaggtaatttataacacatataaataatagatagtgtgttttttcatttgatggtcttaaatttttgattagggtcactggatccaaccaacagtaacctgcctcagcaagtaattaatccgattctgatggaaaatagcagaagatatggtactttcaggtccacaactaacccctacttcttctcaattgacggagtttgttgataaataactttatttattctggaagtcagctacttatttcaatggatgtcaatgaactcaagttataatttattaggttagatttctaggtttatcaggccaaacagtggaagatatctgtaaattcagcagactttcagaaattggtaatttttatcaaactcattccatgtagatgcactgaagctagttgcaagttcaaggtgcattgctcctacaggaactgatagccttccgtaagtttatcctacacatttcctctaaattaatttatttacattctgacataatttaatacatgttaagtgtggtataactagagtttattaataataacgtaggatacactctgagttggatgtgttcaaccttacagaagattccgagtatccacatgttttttttacgggaaactgtaaagagtttgaagtaggagattttggaacctcaggatccacaaaactgccaaaattagtctgcgtgccttcctttaagagggatcccacgctggtgctcatttctctgaggaccttggaagttacacccttaaaattaacataaattattttaattttcatctaaattaatttttttacattttaaagttatatagacatgaatttattacatgtgcactttatggcattacgcccttagttttaagccagggatcggatttttaagttttaaccctaatttttaattaattcacgtgaaaattgtagaatttttaaacgaatttttaaattatttgattttttctttatttaaaccgttttaactaatatgtgtaagatatttgaaccctaaacgagccaaaatgtcgttgagcttcgatagttaccacggacacagcccggtttatagtaattttaacgaatacaaaggagacgctatttcagattcaaatttgaattatgccggaaactcaaatgatttatcgaacaaggttagaagttacatttctataatttccttatttttctaatgtgtaactaataaatttgtagataaacgagaatagtctagtggagttgactttaaaccttgagagggagcgggagacttatttggaggctgttgctgtcctacatgaccaactgcgcgaatcccacgagcagtgccagcaacttgtaaactctcatgccgaactgactagggaacttgaagctgaggttgacgatggctggaaggaggccaaacactggcaagataagtattacaagagttgcaggataatgaaggctgccggtattgacgttaacaagtaccctaacctgtcagtggttggaagtcctgataatgaagccactaacatttcaagtgttagtacaagtggaaatgacctcaatgactacccagctgagaattttaacggaacctgggtctacacactctctgacaactttgaggatctcgagaccctcgctaatattcatagtctttctaacaataactttcctctaactgaagctgaagcgaaaatgagggagaaggtaaagaatgcatggataaatctcaagactcccagaagattctcaaatcactaccaagttcctgaatatatgcgtgaaaccaactctgaaccactatcaaaaatactcgaactacttaaatacgttgattactaactttaaaaggatgataacaccactagtaatctaatgagtttggtgaaaatactattaaaggaatgagtctgttgaaaatactattaatctattgagtatcttaaattaaactttaaattacaggttatttaaaaattgaagtgaaattgaggcgactttactccagaaggctttctgtagatgaactggtaactgaagcgaaaggtttaaaaaatccttttggagtaagtcacaggctctcttcatgggtgctggatcctcattaccatatacgtttttacttgagtactcaacttgaccgtcagagaagaacaagtttactgaaatacacgttttaatatcctcagaatcatctaaacatacatatcacagtatcattaaatatataacttaacttgtaattttgaacaaatatggtactaccttctggaaatagcgagtgtacaccatgagaccatgctgcaggtatgaacaaaacgtcccccgggttcaaaactgttttgtaagcaaccttataggcagatagaagctcagaatttgcacattccatatcgagtttacaaatattctacaaaatcatttataaaaactagtgtttcataccctgtaaggtgaagaggtgtccgttattgacaacttatgtaaagtagatggagggaacaaaataacaagtttactgccatgaatttggaacagaaagttctgaaaataaatttaaaatgaataaaaaatacgtccatggcatcgtaatgggtccagagttctactccaggctgcgatatcctaaaaactgtcgagtggatatgcgttgaagagccattgaggatttgtgtgatttcaggtggtatcttgaaagtctcttccaaataaggatgaactgaagaaaggtttgatgggtcctttctcggtctttcacccaatgatctgtaatatagatactctcggtctccatttaaacacttttgagattcttgaatccgacaaaacatctctgaaaaggtcatgtactcatatttgaaatttttagagacaaaattcaggtttgggtcagttgaaacatgaactgaaactcttctgtcgctcagaatggacttcaaacggtctggtttccattcttcaagacatgaacccaaatcatcagaagtatatcctgcgaaaaatgaagttatggaataaatttacatataaaataaactggattctatgaattataaataattaaatgtacctgagattttaaaaggagtggaatccttaattaaacccctaaaatctgaattcctggatatggaagcaacttccttcatgaatttaacaatacattgataaatttattaaatatattacaggtaaaaaattaaatttttaaaattgcaaggagttgcgatggttgcgaataaaacataattttaacctaaaaaaatacgccctgttttggttcaaggtaatcatcccaacaaccatgaggatttagtaagctattacaggttcttttctttacaaaatttcttgaccctggtttatcctcctcaaacttgcttgaaatgattctgttatcttttaaatgtgtatcgaccttcaggtgtcttgtcccctcttctgtgtcccaaatgtacactatcctttcaagagtatctggaatctcatgaacaatatgattattaagggtaactttgcctatcttagagtcgtgtaatgagtctttgacttttataactctaacatcatgttttttatcataataactgtgtacattttcgtgtaaatcctctccatttaaatctaaatcaaaagaagacttctctagtggacggtaagtttttggagccacttcaacatattcagaaacccatgtttcttttgcagattcagttaacaccctaactattttttgaaccttggacgtgtcaacagtgatgtgccttgacttatatttacagtcacccttttcaactaggtcccctaattttactgctcctaaaacatacttttccggatcagaaaccttaattactaaaaaatttttcctttttagacattttatccttgcgtccctcacgttggaatccaatgaaaactcaacgcactctaatttatccattgataacccaaaactgaagcctgaaatgagtaagaaaaaaattaacatcatcgttatattcttaaattaataaatgtgtgactagactgcctaaacttttcagtacagcatctgccacttggccacttttcgtaatatttctgtacttcttcacattttttcaccgaaattgattttgtctattcattctcggcattgttattttaactacaggtgttctttctttattatgattttgaggcttacatactcctcttatgggcttaacaatgatttcagtgtcatcgcgacctcttgaaagaggaaatacggacacaacattctttaattgcttcattagacaaccaacttcttttttacaaaactttatgggtttaattttcctttgattttttatatttataaacctgcacatctctccttcatcttgccatcctgtccttctatttccataatctggaccacattgactacatactccctctttcactagttctggtcttttaaagttgtcacatctcatgttacatgagtctccataattgtcacagtcacaacattcgcaaacttcaaactcattacagaacccttcgcacaactcacactctataaaatcttcgaagtcttcacatatttcgacatatctaaccccttggtccctaaagatgattaaatttcaatattataccctgggcatatgtatgaatcctcttcacataaattctcacagaagcacatggccatttccaacttacattaactacaccttgctatttcttaattaccacttaacagctaattaaatctaaattcaattatatataaaggtcaattaaatcagatggaacctaaaagtaccatagtataagcacttgcatgtaatttatacattttatattaaagaccatttaattaaaataactgataaatgaatattttcacaatgattttgaaaattttcctccaatttttcgtgtttgtggtctacatggtatttttgttcagatacatcagaattgccaaggcgggcagcaaatacgtaaaggacataactactgtaaattcaatattcatataaatgtgttaacttaatttacttaaattcgtttaggctggatgtgtacctgatagcaaaaacaatggaaagatagtacacattgtaactgataaatataaaatataaaaattcttttaatgagagctagaactgtagactggacaagggagtggttaactatgttggaaaggagttctggagtaacatttactcacacaacgggatattcattgaaaccaaggttgagatgttccaatgggttcagagtgagcgaatgactggaaagttttacaagggagaatttgtggaccacctagtccctggtaacatattttacaaaaatccaaacttcatcccatacgttagtgggtcagggagagtatacgccaaacaaattaaaataggtatgtgaagcagctgtttagagagagattaccaaattgtgtgtcataataaaaattaggtgggtatgtaatagggagagaatggtttgtcaatttaaataacaaatcaaagctaaggattgtcgatgatgagtggtatgaaccaagcagttcagtgcctccaattgaaataaataacctaaacactcaagtgttcaacgactctctgtatacaggagatataatcaatccaaaagtttgacataattttaaaatttaattaaaaaaactttaaaactcaataaattttcttagattggtgacattagaataacattttatgggagtgaggatgtcgagttcagtgccataggtaaacagacgagctctctattgggagaatatcaattaaaaccagtagaattcttggtaatttgtataaatcatattgggatcagaacaaaaaaatggtcctagtggctgcaaaattttacgataaacaggaattgcaggattatatttacagccaaatttcgaaagtaaacatagaaataataagaattgttcttattttactgctaactgcacttgtttatgaagaaattaaatctgaaaaggtacacatgttttaaacaaattaattcagtccaaggtatgtgtgatggtctgttcagggacgataagtggaataatagtttacatgacccaagcaatagtttggtcagtgaataaaatacagaaaagtattattccaatgattgtgagtgtaaaacttttcctcatattaatcgtggcatggtgagttgtagaaagctgaaaatggcctgatttaataaaaaatataggaaactcgacgaatttatcaagaaaacgatggaaggaaatgaaaattttataaaaagtaacgagagttttgattcggttttatggcgtgaagaatctaaaaccaacgattccgatttgaatacagtagcttgaggcaaaaatcgaaaggaataaaagttttaaaaaagagtgtaataattaaaacaaaaataaaaaattttttgagggttcgaagataattaaaattaatatttaagggttgcagcccaaatgatgcataaataaacttattttcccaacacatttatttgttttgtaaatttccacttttggataaaatgccgaaatgagacatatatttatatatgtaaatcctgaaagtggaggaaggaacgcatcacattttataaaggtatgatttggttctctcgtccataacgtattcctaatttttttcctagtatttaaaatccttatttgtttaagtagtttaataagattttttcagcaaggtgtcaagtcccttgagttgaccaagcctgagccactgactctacacatctgttccattttcgaaggcgaaagcggaaataaaccaggctttatacaactcagagattttttgagttatgaggaaccccaagaatgttagtttttacttttttatatttttagtggtttttgtaattaccgctggaggtgacggtacgttaacctgggtggtgtctgaggttgaaaaacattcaattaatcccgatttactttgtttcggaataataccatacggaacaggttggtgtagaaagatgcaaaataaattatttattttaggaaatgactttgcaagggctttgaaatggcacaagtttcgtaatttgaagccatttgaagataattttaaaccgtaaatttatattatgatgacattttttaggcttatgacatacttgaataaattaatgaaatctgacccaattaagcatgatttctgggatgtttatttgaaacttaatcccggtggaagttttaataaaattaactccaaaacaagacttaaagtaataaattcctacaaattaaaataatatataggagaacctgtttgatagtgatgggaacttaattgaatccatgaagtttaagatgggtaactatttcagtattggtacggaaagtcgaatcggcagaggttttgatagacgaagaaccagatactcatgcttcaataaatttgtttgtcctaattatcatattctatcatttaaattagaataaataatagtaactatgtagagatatattctggaggcttttaagaagacttttatgggtttggtgtatgtcaataaccaggttgaaagaatggtttacggagaaaatgaagagatattatttgtaactgacccaaaagaaaagaatctcccagttttgctcaaatcagcatcgctagttgcattaaacatcccgagcttctcttcaggaattgatgcattttccttagcctcgggaattgcattaaaaaacgtttcagaagtatcgtttacatatttgtattcagatttaatgatgatatacactattacaggcacatttatttaaaattctcccaaaaattttttgataggaatataaaaaagagcttttaattgcggatcaagtcatgggtgacaagaagttggaatttttttgttatagagatatgaaggatgttggattagatatcgtaagttcagaattaatgatagttaaaaattgtgtaagaagattaatggaaattttagctaaaattcggaaagtccaaacgactccatgttggaggtgggccctggaaaataatatttaaggatttatctaaagatgaaaaatgttactttcaggtttgtgtttaaattttcataattcctaaggtggatggtgaattttttgtaatgtatcaacccaagctaatagaaattaaacactataaaacaattaatgttgtcaaataatttttaatcttttaaaaaattatattaagtacatatataagatcaatttgagtaatcgcaatgccgccgtttgatccttccaagctgcaggtatgaaaatcacgcaaactaactcattttttaggttaaaaataaaatgcctgcagctgttcaaattacagcggagcagattttacgtgacgctgtagaatggcagacaaaggaggtgaaaacaaccaaacaaactatcgcagatgaagaagagttgaacttctacaagtaatgatttaaatataacaaatttaattaaataatttgattcgatttgatataattaatattcagggctcaaaaaaggaaagattttgaagatacactgagaaggcaacgccatcatataggaacatggataaaatacgctgtttgggaagcaaatcaacaagaattcagaaggtaatatactatacacattgatagtataatatttcctaaattattggtttataatgattttcagggcaaggtcgatttttgagagagctttattagttgaccctaataacccctctctttggctaagatacattgaaactgaaatgaagaacaagaacattaattctgccaggaatttgtttgacagagttgtttgtttgctcccaagaattgaccagttttggttcaagtacgcacactttgaagaattattaggcaattacgcaggagcaagaagtatatatgaaaggtattttacacatttttattcatattgtatatttaattgtataaccatataattacttaaatagtgttaatgaatttgtagatggatggagtggaacccagaggataaggcatggatgttgtatataaagtttgaggaacggtgtggtgaagtggaccgttgtagaagtatatttaacaggtagtgttaataaccattttaatcaatatgttaggtatatagaaaacagaccaagttgtatgtcatttttaaagcttgtaaagtttgaggaaaagtacaagaaaacatcaagagcacgttcagcattcgttaagtgtgttgaagtattagatccggagcttctagatgaagatttttttataaaatttgctaactttgagcaaaggcataataacattgaaggagcaaatagtgtgtatgaacaaggattaaagttactagataagtcgaaaagcgagaaactttatgacagctttatttcattccagaaacagttcaagaatgagtacattgatgacctaattagtgtaaagaaaagaaacgagtatgaagatgacatagctcttaacccagacaactacgatacctggtttaattacattaagcttgaggagtctatactggaaaatatgcttaaaacttgttcagatgataaactgggagcacagaaagatagaatagttcaggtgtatgaacgagcaatagcaaacctgcccaaggataataatcgcaaactttggagaagatatagttacttgtggatattctacgcattcttctcagaattacaacttgactcaaaggaaagagctgaagagatttacctaaagtcacttcagatactacccagagatttttccaagatttatatatatctctcacaactctatgtaagtcaccttattacttagtttatataccatcatatgcattaaatgttacattccaattttagttgagaatgggtgatttgaagaaaatgaggtctgtaatgggtaacgcaataggtttatgtaagaaggagaagatttttgagacatacagtgatattgagttgaagctggggaatattgaccgatgcagaattatattcactaaatatgtggaaatctatccatacaactacaaggtaatatattagttattgataatccagatactagatttgatactaaatttggttctaattaattaattagagttggctggcatacatcaatttcgaactcttacttaacgagattaacagagtaagaaaactctgtgagtacgcaattgagatggaacaaatgaataatccagaggctatatggaacaagtacattagcatagaaaagaactacagctactcaaacgtgattgctctgtacaagaaactactacagaaaacccaacacattaaggtatcaaatatataaaatcaaataacataaatgtttagatatataaggagtatagcaagtacgagtatgaaaatggtaataatgaaaatggccgtgaagtaatagaggagggaataaacctttataaggacagcagtgtcgagaggagtaagctgttatatcacttggtggatatggaaaaaaaatacggaaatgaacaaacagttcagaacgcaaagaagagacttccaaagaagatactaaggaaaagaaaattagaaaatgaccaggaagttgacgacataatatacgtcttcccagatgacaaaaccaacaccaagatacttgaaaatgctcttaaatggaagaaacaacaaaagtagtcttgggtgtatacataacataaatgttttgactttaagtttaaataactgctctgaaattagacctaggaatgtcatagagtttgaccgacatcaaggatcagtgataaatcataacataatatatgatcatcaatcattattctaatctaataatattttataaataattaagaagtttctagaatcaaaattgtgtagtgaatactatcccggggtccagttgtcaggtttccacgtctatcaattttctaatgtaaaagttccaaaaagaatgtgtatttatgtatatgtggttttaataaattttggatgaattgtacattcaaaatttaaaaaatgtgtatgttatttgttactgtaaatatcgcagttcggactaatttttcaacacaccgtgtttttcctttcaattatttaaataaagtgtacacttccggaaaatggaatgtgtacaattttggttgataaaaccaaacgaaaattatttaggcataataccctgattatcgttatcgcaaatacacaaatgtttggaaatgggccaatcaaattgccaatcaggaaacggaaaaacagatgagtctggatgtgaaaacggagatgggaagactaagaagattatagcatatattctagttggatttacattattcaacactttgatgattggaatgaatggatcacctttttcgttaaataggtttaaaatacccggaaattactatagcctctacgtgagcaggttacacaactgtatggaactggcctgttttgtaggtatagttctaggtactttgtatattcttccttgcggaatttatagtgagtatgtttctattggaattaattggatgtattttatagtaaatgttatattattaatatcgtatgtgactggtggcgaaaatggccatttgacattttattattggacattggcagcgtctgccactgtctatggaataactcttcaatttgtttataaaatgagtgggagctgtatgccatattttatggtaggtgttccaatttcttctgtttgcacctcattgacacactttatagtattaagcttattcggtaatcgcagaaaatataataccgacttaataattctaacaactgagatctctatatcagtaatttctacgggtttaactgcatccatatggacggttgcatatatgtgtggaggaaatagtaaacctaaaactgagaaaacttgtcaaaatggagataatgattcatctgataccaataatgaaagttttaaaccagatgtgatttctccaatcctaatgacttcagttgccctttctcttatttatgcttattacccaggtattgcaccaggccttttggttgattttcgttacgttcacaagattgacctggttctcatgtttatagtcccactaccctctatagtaattgcagtattatcttactccggatatggacctgatggtaagtgggaatgtagaagacattggcatgcgtttgtgattttcattgtttcgatgatagtttgttcaatattatttacaacttctcttcattatcctcattcagacgttggtcgttccattgttaataagcctatgatgactgggtttctcactatactattctatattagccatgaaataatgctttcagtgggatttccgggtatttcggagaactggaattcaaatgctacaacaggaactggtttgctttgcggaactggccttatgattttcgttttatttggggagggttacatcattgaatacaaaaggcataataagctaaaatggccaacagatggaatggcaacacgcactgcatttaactactggatgagtagatcttttgcaaacgccgtggataatgtaaagtgcattttcacctcagatgtgaggagagacattttaagatcagttcagaaaaaggaagtaatttaatatctttttatacacaatataatatacacccccaattatagactatccgcgtgtatgtatatttagttgataaaattattttttaattctttgtacacttcgcatgattgtatgtgatgaatgtcgaccagttttcatcctctgcattgtataacttttgttgagagtgtatgccagagaatcggcatacttatcgtcgtcgggctgaaataaaattatgtatttaattaaactactttagcagttgattctagtcgttccaactcttctttaatcttctcaatatacaatttctaaagaaagataaagaattttcaaaatactagagcttgaaagtcctccttatagaaatatattaagggtttacgggtatggtcagttacacacaagagggtttcgttctaaaggtaaattaagggtgtgtagcatacatttccattcaaagtagtattgaaaacaaacagctgctttccccaaggctcaatctatagattaaaattgaaattataataataatactgggtgtaaaggtgatgaattgggaggtggccattcaccgagcttcattcgtttgtactgtatttctgaaaattttaaattatataaattataaaaaataaagtattaaagattgaacctttccataatttactcctcactaaaagaatcaaatgatggttattattaaagtacctgggtaatactgcacacaattctttattttgtatctcaaagcactcatttaaattaatatataaacaggatgtggtgtaattttgaattgagaaatatgaaaataatggtaactacaacttatttttggacaattctttagatttttcgtatccgtggtagtctgcagaaaacgctctagctataggtctattaccccttctaccaaggcctacccagcactgcaatacatgatcaaatattatattcctgtcactattagaatcttttaaggactcaggagtaggtgtgggatctgttgatgtgtgctcaggggtgactgcgtttgaattttcaatgttgttagaattatgagcgttatcggtatcactggtgtgtgtggaacttgattcttttaatttatcctaaatgaccagatattttgatagataggtaagtataatacgtttataaagtttgcaaattcgagtgattttgattttgaagtttggagtccgaatttacttattggaaatggttttccgtttagtttgttatattctagccacagaacctcccactgctcgttaacttcgtcgaaaacaactttacagtgttcaaatttatcttcaatattaaaatagtcagatgaaatagtaacaactttggggtttttaggaatgttccgtccaacactgaagaaaattaatggtgtaaaggagatttttgagattcttaccgagttttattatgttcggtgtatttgtttccaattccccaattgaatttgtattctattagttcagtgcgattttgagaatcctgaactttatgtatggaatctaccttagatgttgaataacttttataaaaattaaaaaaaataaatcttctatggtttataataatattttttgttaaattcatatataaactgggaaataaaagtgactatttgtattacacattgggccacgattataatgtcagtataaattatgtaatggacgatgattataatgtgttgttcattactcttctgaacaattgtctcagtaggtgtataattgactataattgccttaataaacagcttattaacaacgaaggatcaaatgttgtacttcgtaacctcttgatacagtttaccagagttcagagggagattttcttaaagcttaaggttattttcgacctaactaaatatgagaaaaggataaacaagctccttcaggagattaacatcgactacttcaatcaaaatgttgttcagaatcttaacagaaacttgttatctcttagcaaccaggtgaatgatcctcctccaaatataaagctttctgtcgacctctataacaacttaaggtacgaaagaatgcctgcaatgatggcggaaatcgcaaagtctgtaaacacaattccagtcataaagtactccgacgaggaaattaaatcctgtatctttaacataaaattacacttttcaatacactttcaacagtataaaatgagttactctaataatgatgaatctattgatgaggaagtggaacctggaaatggaggttcatcagttggtgaaatacgatttattaataatatatgtaattatagacggaataattactttgatgtggagatactatttgactttaaaaggtatcaaattatatttgtatcggttctgggtcaaactactaattccccgacccttatggcatacctaaaccaggtactgaacacgagaagtgggaacgtgtttatggtcttagacagcgccatcatgaagtatgtaaacaagctaattttgcaaaacttgtataaacagactcaggcttattacagtgcaggccacgtggtatttaactatgactattcagaggataaactggaagttcactgctttaaagagtccccaactgtgattgaattctcagtcaatcggaataacatacccgtgttcaaaattaacaacacattcaaggattttgcttacgatattgatttaaactcctacatcaaacagatactaccagactcataatcttgtaccatattgtacacaatttagttataagattatcttaggttataaagtttaaaagtgaatttatttgattattaatgattattaatgattatttatggtttagttgttgatctagtggtggtttaacttttacatttgttactggtttaaccatactctgaaataaaataataaagtggaatcaagattaaaattacctgtaaaaagcgatgttttatcctgaatacaggttcattctctacaattgaaaaataagccaatcttgtatagtggccacaatgcgatgataaagtatctctctgaatatttaaaacccattccctaaaacataattaagatccgaatattaataattaaataaagataagaaagtaccatttggtgttatcaacgtgaccagtaccctggtatttactttgaagatgctctaactgggcatgaatattaaatctatcatatgatgacataatagtaaaataacaaacaaatacgataaaaaaataaaattatgaaaaataattaattataagtgatattaagtgatatgttgtggtgatccgaagattctaaaatcaatccactaaaatctttaattcggatgtattttaatgtgtatgtatgtgtattgttattatttaaatggaatatttgagtgaacccacacttaagcaaatattaggggatgatttgtacagttatttcaatgagtctgacaaaaatgcagaaaaaccttattccaccgaagaaaacaccaaaaataaagaatcggataacgaaaattcagctctaaaaattggtttaacaactaaacaagcaactgatcacattataagcaaattaacagtatattaatactataacatagttagcatttatttaatatgtatatattaatgatgaaattgtgtttagaacatcttgtctgattacaatgataagatcaaattaaaggatttattcctggaattggtccaggttgatataatattaaacttggcagctctgttagccaacatcggtaagatgtgtaagtgttaaatttcctttaggatgccttgtttacaacatagtaatcgtaaacgtttactgggagttcttgctagagtttctattgctattcttttggttgatagcaaatgtgtatgttaaattactgttcaaggtgtgtaaggtttacagaaagcgtaaccgcttggtggaaattttacattttttaaaatttgaatttacatatccaaaaccagagtctgaagttaaaaagtataatatcgacccctcttcctctgattttatctcagtttacagagattacgactgggtgaggctgccaaggaacgtcctggtgcaaggggacgtttacaagcttagaatcaacgagattttcccctgtgactctttgcttgttttgaacgttaccaataatgacttggttacgcatagtgagatctacagagagggagatccctgcaattttgtaggaaacccggttgaaaacgaacattttttagacggaacatttgtagcactaaatgactcatttttgaaatacatcaaccattatttgtttaatgatcaggctaactatcagccgaatccgcaactgccaagaagagacagttcatggttcaggaacacccaggaggagaccaagatcatatggaactataatgacaattacatttttctaaacaacagtaacaagatcgtcatagtgataatcataatggtgactttgattctgattctcatgtgggcgatactgtatagagtggagagtaaattcaattccataataaccatgtaccgactgctgataatgctacagttcgttggtatcgacccgttcagcaagttggcagagttatggggaaacgttaaaataatggcaatatttgaccagtatcaagagacaatgcttaaggatttggacccagtcaggtctgtaagttcatcggattcgttccttagctcctcaaccttcggctcagtgtcctcagatatgctgttgaatgaagtcaaaatttcatttctgcacgtcaataaggtgctaatgctgggtctgtttgaagaaaatagtctcataaaaagactttccacaatcactttgctctcatttatcgacgacgtggggattctgttgaacagttatcaaacactgcaggaaatttcagttatatccaaaaatagtaataacaacaccgccgctcgtttaagccagcatcatgaaaccactcaccaagaagaaggcacttttacacgcctaccaagcaccgatgaaagagattctgcacttaacatgacaaacatcctggggaacgtatttgaccaggacgtggttgaagaaaccgacgaactcctgatcttggatatatacaacgatatagacttgtatgggaaggataacagcgctttcataaacgaaaatgaactgaataataagaacttgctcaagccgctcatattctcaatagcgctcacctcgatacttaacattaacatgtatcgctcaagcctgttcaatagttacatgtcaatgctcatcaacaatgagctttccagttatacaaactgcttgtgtaaccttaacagtgtgttcaatataagaaaattttatctaaaaccatttaaactactgaagttcataatcataaacacctccgggataacctacggtactgatatgacgagtcgagcactagatagtaatgacgactcgattgttatttacttttacagagacagtaataaaagagtgatacaaatgttaataaagtgtagaattagtatacttaacgattgtaagcttaacttctataacggcaatgagattaagccactaaacagagtgctgaggaggaagatatccgacctcaatgtgcagtggctgtcgaatggaattgggtcgtttctgtacctttataagccaatttcaatcgacgactacaacattctccagatccttttacccttctctaccatttataataattacactaaccctccggctacgaatgttggctcttccggttacaccacagcaccaaatacagctactactcattctggaacagagactggagttggaagtagaagaaagaacagtaagctgatgttcctatataagcataataatctgtactacaagtataagggtattaacatttacaaactgacaaacaagtttaaaaacacagctgcatctgaaactacatctcacaagaaggacgtgatcctgggcagcttcataggggaaatgcttaaatcctacatcaaaaattcaatcctgctaggcattgtaggaataaagtatgaggcgaataaggaaataaacacaaagataaatgagttacacgagtctggaataagattcgtgtacttctctaagcataacgaaaaacataccagaattattggaagtctattgggacttgagatttcgtggaactccatgatttccctctccacatccgaaacgtattttatatttacaaccttatttttccaattttatatttacaaccttatttttccaattttacatttacaaaagatagattagttaatgtgttggtgactgtttaacaatttgatttaggtcttcctacattaatcaagaaggacacattgtgttaccaaacgggatagataatattagacaacatataaaatacattgatgacatacctcttcaagtattttttatttaaaatactcagttatctgtaaaattttttatttatccttataaacaactttaggtgtctctgttttgtaactgtaattatgagaatgtcattgagatgttcaacatactgaacgataataaggagaatataatgtgcataggctcaggacttaacagtaataacttttatttgttctcaaattcatacttggctttctcaatctcactcaactatcacccgctgtgcaaattctgtaaatgtatcctaatatccagttacttaactattaacatcacatttataataataacaatgttataggtaagaggtggcaaggagtaagtaggcagcatgtgattgaagaaagcagatcagagattgtattatcttctctgattacatcgttaccgtgttcactcaagtacaataaactgttcaatgtaggtttaattaatttaaaaatattattagatcaatgaaggagactcgctgtttgaattattgtttgaactatttaaagaaagtagaaacacctcgacaaacatacaggaggcagtgtcgtttatgcttttgtcatattacaccataatcacaatgtatttcatacaatccctcctgtctctaccatcagttttcaatgtaagtatacagtctcatagaattttcagaacattgacataattttgatcatgtacttttacataccgctaatttcagtcacactcctcaataacccaatcatggacaagatcatggagcagctgccgaacaagatcgaaaacaacaatatatactacaaatactacgtaactttaacgataaataattgatttttagttcagaatatatagcaggattgtcgtgttcgccctattcacaatggcaacgcattacataaatatattttacgttaataagcatttgaactcaacgctcatgattaataacccgctttgcaacaatttctttcactgtaagttgataattatagtttcataataatatttcagaccccaaagtattttgtatgaatctgctaaataagcacttcaactacgcccagtacatctggctgatacagaactttacatcgatagtttttgtcgtatttctcattgtatcctcaatcttctggatacagaagtacactttcctggggatctcttgctttttaaactaccgttggttgttggcttccctcttgatatcctgtgttcatgtgggaatcgtggcccttaaactctacttcgatcccatcgaagactttaaggtcgttaggattttaattgtgaactcgagtctttcacttttgttcattgttccgattctactgattgaccaggctattaaacttttcatcataaaggacaaaaacacccagcagaagttcctgcagcttctgttctccactaagctgggcacttggtccccaaaataaatattttaaaatttttactctatattagtatgcgtaatttaatggatggatggtattacaggttgcgagtgtgtattatagaaggttgttaatgtgtagtatgaaaatgggatttaaaagtggattttatatttattaacagtatacataagagtttattgtatgtatttttaaaaataaatcttaatatcataattttagtatactgttgtttattatgtggcataagatatgagtagaagaattttattaaaatttcaatatttataatggatgactatcagaaatggagaagaagagaagtaaaggaaacgagaaaagttgaatatgcgttttttccaaatagaacagtcggtcaaacttattttgtaacagtattgatgggttgtacaattatgggattcgcatacgctattttgaaaatgtctgataaagtgagggaaaaaagaataaataaattaagatcggagaggaaattaatgaaaacatatataccattcgaaaatgtaagaataaattattagttaatatttcatagaaggcgatgctggtcagaatgactgatagaggcatactgcagtaccaaagagaaattttaaatttgccgaaacagcctacttcactgatttcagaccctgatattaattacccagaaccaaagggacaaatgacattctaatattttaacacataatatttaatttatcacaattacttatcattagtaatcatctcaataagaacgatcatgttattatgaagactccaaaaaggattttgttaatcccctacgtggcttgttatgcattttcctctgacgttcattctccttgatcagattctaaacattatttcagaaacgtaaatttggggagtaaatatttaagaattaactaaaagagtaaaattacctcttggagtttgtattgcgattgtatggcatcagatagaaaagtaacttccattttctgacgtttagtgtgtctctgcttaatcatcttgtttttgagtaggtttgagaaacgggtttggagtctagtgtcaacttcagcgtggactggttttaaatcaaaattggagtcctcaaacagaaatgaaagctcagactgaaactcaacgtcaagcggtactgttccgataaataatgtcacagtaccatcatcccaaagtactatgttaccattgcttgaaaccggtggattattttctgaatctttgtcatcagaagagtcattactcttatttttcatatcatacagtagtactgaaagattatttgggttaggaggatgatctaagatgtgagggtttgatttgagaaaacttcgaatttcattcacgtcggaaaccatcaaagtaggcggaaacttacatataactaagttttcaggacgatcaggccttggaagtaagggaagcgtagcggttatgaattcgttttcataaagtggagactggtcctgtcctgaaggatcaacttcaagccttgttggagactgagtcgcaacgtctgtcctggcaaagtcgtcaccattgtcatcactatcttcgaataatccaaccatattatcttcattaggtactgtatcagtaaccgtctgtgtaacattaaaatttggataattatcaacattatcgatattaaaattatcatctgtactatttaaatggtcaacagtgttatttaaatggtcaacagtgtcattaaaatcttcatttgtgttattaaaatactcatttgtgttattaaaatcgtcaggagtgaaatttaaatcattttcaacattaaaaatagtatcaagattatcagttttatttgaatcgtcaatggcagtgggcggttcattagaattaccaggttcaggatcatttgtgtttaaattatcagtattatcaacatccattgtgtcaaactcattcttttcagtgttttcatccattttaaaccaaaatggaacactttaaaagttaattaaattaaaatgatctaaaaattaattgaaataaaaaataaaattaaagataaattggtgtaaatcatctaattgggttcaacatcaaggttagaataaatatacatatataaacagtaacaataatgtattgtttgtgtttaaatttattttgttattgatgttgtgactgggattcttggatgtagatggaaggctaccgcgccagtaggtcaacgacgaagagtcaggttcagaatccaccaaaacagtctccagcttcacaaaaacctggtaatttaaaatccgctagtgtctcttctaaaggtttaaatcctgattccactccaagtagcgcctctggtaccagactagtatatactcgggatcataacacaccagagtcactttctggaaaattaaaaccaggagatgaatttagagcaaagagagctagacctacaaaacctgatgatgaaaagactgtaaagaaccctgaggccattagtcctgtcaggactgataatgaggacctgatcaacggtcttgctctacagcgtcaatgggacgagaagcctgatattgacaatctttcaaactcactactcaacttataccaaaaacttgaatctaaagaccgttctagcttgaatgatttgagggctaagatattcctatcctccctaagggtccgttcaaagagtgtttgttaccttaacttcactgcgagtcgtctgaaatcagtgataaaattctccaagcacttgaatttaaagtacaataccctcaatcacaatgtaagttaaattttagttttaattattgttttaggttcccaggattgagaagcattacttaaccctgtgtaagtactaccagaggagaaagagcctgaacgaagtttacgaaaagttgagtaatgtagttttcaagctccctagtgtaaaacaggcccaggtaactgccgaagagctgattgagaacaaagctaaaacgttggaaaaaatcgccaaaattaaagagcagattcaggctcaaaaggatcaaattaacgagatcactcagtcgctttcaaatattctagatgaagaaccctaaacacactaattttattatttttcatatgtattgaatatttcatgtaccatgtacagttacttagatttcaaaatttcatttaggtgtgctgatccagagtttttgagcaattctttataatattcgtctatttgttttatattttgggtatttgagtgtattggcggtatcgagataaacacaaacccattttccttaagcatcttttccttaaagtcgcagggtccaattttcctagtttcactagggtcattcaagttcctaataaagtgagttggtccgtcaacctccaatattatcttctcaccatttaaacaaatgtaaatgtcaacgctaaataataaattgagttgtaaactaagtaccttgataagtcacttgttagtatttccagctggtgtggaatattttgacgtataaggaagtctgagactaacttttgggatttggatattatcttcccgtttttactatacttactattgattaagtaacccttacaagtttctatcaactcatctctcaatggcaattctgactctttcagctcatcacaaagactgggcgatttcaatatcgtataaatctaaagataaaattataatcacagaataaattatatattctaaaacagataactgattgatttgtcgaacaaagctgactggtgtatctaatgaattacctgattaatgtgtgaaagtttgtacagtgaattgttttccagtgtttggtttaacaattggttaatttcactcaaattggtgacgggtaaattcaatattgaaaagctccagtagattctaatcagtgtgcttgtgtcaagtttgtaggcttcaattatcctctttacagtctcataaagagtatggtccttgaatccacaaatacaaaaacaccaattcactgtagcgatactttcctgtagccgcttgttaagaacaaggccatcggtggtaatgtcagtgttggaagatataaacaggtttaagtataggttgtaaagagatactaaatcctggtatagttctttgtggtatatacggttggagccgagaaacttgaaataactggtccagatcctgggaaggtttaagtttgggtagatcttattatcgtaaatgaaactgataagtgtgtggaagaaatcgtcagttaggtgtgaagatggttccaaggcacggaaaaaacggctcatagctctagcagttcttacattgtcgaggttacacagtagttgctgagatagaatattgacaatggtagggtcagataggctagaggcctgtaaaatctcaacatacttcagtgtggtgaaaatatcaaatctatatggattatccaaaagtagtttatatatttgattgggttgtgatgttatattgaagggtatactagcatttaaatgcgatgcttctgtagaatttgttttagaattaggggtagaaccaacagaatttgaaaaattaagtctagaactgcattggtaattgatattggtaatattacaattggaagacttattgaataaccttgaaagctttatacagtttgttaaatgaagagaacggttattaccattcaaaaaataaaaaatcgacattttacaagcatattcattttaaaatttgcttaataaactgagaaaaccattaaagtgttaggactgatgattctatttacaaggttgtcgttaaaattttagtgaaactgcatttaaaaattaatggtattaaaacagtcttcaaggtgtagaaatttctttttaatgtgttgggaaataattagaataaagggtgagtagacgtgactgtgttggtaagaatcaagtggaatgaaactgcgggaggccaagggaacagaatgaatttgcgatggaaatgtagtggttagtagatgatatgaaagttaaaaaatagggtattggataattatggaatatcttaacataggtttaactcagggtagttggtgtccccattattaaaaataacattcacttaattttacttaagccgattcgagtatttttaacaactttatcaaatttcaaattttgccctagatttttagatcttttagttctggttaaaatagtttaaatataaatttttctttgtaattttacaacactcgctaaaattgatagaaaaaatgacgtaactttttattcacttttatttacatttttaattctcggtgtttttaataagatatttccaattttaacaaataacaccctataaaaacattttttaggctaacaccaacacttttatgggctcaaacaaaagatgatctctacttgacagtagagttaacaaaaccgtcagatttgaaagttgacttgacagatgaagctttcaagttctatgccaagaaggacggcaacgtttatgagttcgacttcaaatttttcaagccagtcaagtcaagtgactacaagacaaaggaccaaaggtttctcgaattcaaggtaccaaagtcagagcctgagtcatggacaaccctcaactcctgtggaaagaaacactacatcaaatgcaactgggacaaatggtaatttttctataaatatttttattcttattggttcaccacctgtttacgattagtatgtactatataatggtttagggttgactctgatgccgaaggtgatgacttgaacgatggattcgacatgccaaacttcggaggtattattaacacattaatcttacttaaatgactaaaatttggtgtagattttggagactttgacatgaatggcatgggtgatatggaagatgaaatggacgacctggaggatacagataacgaggaaactactaatgccaaatcacctcactgcaagaatccaaactgccagtgcgacccatgtgagtgtactccagagaagcaatgctcagagggagcatctgattgcccctcaaaagaagattgctgtggaaaatcagagtgccatccaaaaggagcagaggactcttgctgcgcaacaaaaaactgctctgaaaaatgcccatgctaattttttgcaggcatttgcttcactaaattctattgtctatacatatacattgatatatatagtactagattattgtgtaaaatgagtggttagcaatatggttgagaaagttagtggttgtgtaaataaatatatggatttaaaaataaatataaaaatggaagccttttaattaagggaattgataaataattaagaaaatcgggtaattgaataagcaatcgtcagtaaatataaaattgatctgtgtaaagattcgccccccatgtgaaaaattacattaataatatttgacaatatattataaagtgtaataattttattaacaaacctctagtgttttgaaatatgaagttaaatttagcaaatcccttcacggggatgcagaagacaatggaaatcgatgacgagaagagattactcccgttcttcgaaaggcgtatgggaaccgaagtcccaggtgatagtatcggcgatgaattcaaaggttacgtgttcaaaatctcgggaggtaatgacaaacaaggttttccaatgatgcaaggtgtccttactccaacaagggtccgccttctgtttaaaaaaggaatgaaatgctacagacccagaaggaaaggtgaaatgaagagaaaatcagttcgtgggtgcgtagttagctcacaactctcaatcctaaaccttgtacttgtaaagaagggacctcaggaagttccaggacttactgatcaggaagcccccaggagactcggtccaaaacgtgccagcaaaatccgtaaattgtttaacttgagtccaaaagacgatgttaggaagtttgttgttagacgtaagatagaaggcagaaacaagacaaaggctccaaagatccaaagactagtaactgcacagaggcttcaaaggaaaagaagactcctgaaacaagccaaggagaaggcaaagaggaataaggaagtattgagagaatacagaaagctgatgcatgaatatcgctctaaaaataagtgaaaatgactcgttttagttcaatttaccttatttaattttatcctcttcttcgtatactacacctagtttaattttcattacaaaatctatttagataatctagtttaaattttggatcattggtctttatttcattttattggccagaacctgtagggttaaaatttcactaaatatataattttaatagtaattacaacatattatacacaatttatataataattttttgttttaaatttgtaaactaagattgagaattaataaattatcgcaaaatgtcaaatttgtcagtattgctcattccttcgagaatgttagtgttagatttaaattttttataataatcactcatttcatatgtaggaaccttcaaaatctcaagcagagacgacataacgctcatttgggttattcactgttaaaaaggaaaagcgatgcccttacctcaaaatttcatagactcctaagggcaacagttcaagtatttattacactttactttaataatatagatttgatatcaataaaactaatttttcttttttagggtaaagagagactagttgaaggcttgaaggatgctacatattcacttgcaaatgcagtttggtcagctgaagactttaaaagtttagtaatagagtcggtgggacgcccatcagttaccctcaagctcagaggagagaatattgcaggagttttgctcccagtattctcacttcaaacagatcctacagtagattgtacctactatactataccactatatacataatacatttattaatatatgttttagtatttgcaaatctgagtttgagttctggaggaagtgcaattcagtcagttaaaaccacacacttggctgccttggatattttagtagaattggcgtcacttcaagttaaaatttaattagtttttaattaacacagtttaaaaatatacataagatgataaaatgtgtagatatcgtttattatactgaatgaggagatcagaatgacaaacaggagaatcaacgcactggataatgtacgtgtaaactatcatttaatgttttattcaggtattaataccaagcattgaccgtaacttggagtacattagaagagaattggacgagatggagagagaagaattttataggtatttatagaatgtatttactagatctaactatatttacatttttatattttatataaaaacatattctggaaataacacaagactgaatactatttttagattgaaaatgataaagaagcataaagaacgagaagaaagtgagaaggaatctgagcctcgccagtaccagtcattcttcgacccagtagatgatgatattgtagtctagtagatttcaaaagttttatcaatattttaactaatcttatgatcgtattcttgtggttatgtgcatattaaattatgaccgttttttcatggtaatagtgcctgtgttgatctttgtatggtaaattaactgattttgatttttataatgtttttattttaaagtactgattattttttcacctcaattttgattgttttgtataatttttttatatatttgtataatatttctctaacatctcaagattctcttacaatatttttaaagtagcctacacttgagtaaatcgcaaaaatcggtgattcctatgaacaattcctctgagtgcctgtttaaagttaaatggactaactttcgaggccagaaagtaccgtatcttctacagaataacgatggcgagtgcccactaatctgttttgcgaatgtgttgttgctgaggaggaagttggaactgtctaaagatcttggtgcgattacattcaagagtctttgtgttttcatctcatcattgcttcctcacgccagcccagaatgggtaaatacatacatatgtactacatattctaatagatatttttgccctataatggttaatattcaatttaggtaacatcagtattagagaccctaaagagcggtcttttatttaactgcaagtttgattctaccagagcatatatagatccagacccagaacagttatttctatcctttaacattccaattaaacatggatggattccggaccctattatttacgggccactcactaacttaaattacgaccagctcctggaaatgctcgccatttttcaaagcgagaaggaagtttccagttttgaagagcttggacctgacgattctgaacatgaagacaaagtggagaataatcatgaaaaccaacatgacgatggttcgaagttggatgaaagtaaattagaggaacatttaaaaaacttgaaactctcaaatgcagacgagggagataaatcagtatccttaaataaaaaagtgaataatgtaaaacctgaacaagtagatggagataaatcagaaccagtagaagaaaagataaatactaaagaagagaaaaaagaagataagggagagaataaatctgaaatagatgaatatgtagcaaacttagccatggagtttctggaaacatacgccactcaaatcacagagtatggaatgagagtgttaagagaagaaattccagaaggttcactggtagcattgtatcgcaacaaccattttctggtagcaacgtgtaatagaggacagttattcacactgataacagactcagccttctacgggcatcgatgcgtctgggaatccctggagagctgcgagtatttcgacgaaaacttcaaccattacacgcaaacttcaagagaagagaaaccgaaaaaagttagatttattgataaagtaaaaagagtgttcagacggaaaaataggagataaattaaaatatttccgacacaataacaccttaaaattgatcttataatttcgtatatgtaccttgtataattattttaaataataaaacaaataatttaaaatatattttaactaatttggctgtaagatttcaagtaaaagtagttgtaaggagaactgcgaaagtagtgtatggtgtaatgggaaagaatagaataaatatattttagatagataattatgggtaactaatgtcgcagttcagggatacatttacgcgagggagtaagaaggactccgtcctttcctacgacgattttgcgtccagaatattcaccagcggtttcattctctgctttttaataccaattacaatatatctatttaaaaagtggtttttcgggaaacgaccgaaacttccggcgaagttgcgcctgtctgatgtacatatagagagcaagaagcaagcttgcgtcaaatgtgagtgctcgttttgcagaacgagaagagccgaagaatctaaaaaatccctcaaattcagagaccattttacattctctagattatttcaattcgtacttctagcaacattttggtggatagttgtttatttgatttctggtaagaatattctgatacatttggatattccactaataaccataattttagtaatattattcaattcaaatttgtaaaacgtttgtaggaattaatccagatgataatattaaaaggtttgacccttttgaactgctcggtttatcaaccgaagctaccaagaaggacatacagaaggcataccgccatctgtcactcaaatatcaccctgatcgaaaccccaatgacccagaaatgtctgcacatttcgttctaatcactaaggcatataggacgctaaccaacgaggtaacattcaaacattgttaattgataactaatttaaataatatttaaatgatatgtatgttatattctgataggtatcgagaatgaactatgcaaagtatgggaatccggacggacccggtatgatgaagataggaataggacttccaaggtaatttgcacttgatattcaataaattaataaaatttttaggtttctggtggacgagaataaccagattgtcatattatccttattcttcctgctcttgctaatagttgctccgtcactctttctgtggtattatcgcacccaaaaaaatctcacaggtattacaaactatatgtttgaatgagatatataaatgttttaatttgggttttaatgaattttagcttccgggatccggttggagactttgcagctgatatattattcattgaacgaaaacacaagacataagagtctgccagaagtttactcatgttcgtcagagttgtctaatattccgtaccattcgagcgaggagacggagctccgtaaatattttcacattttgagtgattataagaggaagaacatttcctcggagaccttcaggaacttcttgcttctactttgtcaccttaacaggatagaagatctatcatcacaattaaaaaaatctctaaacgaagtcttaaaatatagcatgttaatcacacactgcatgctcgacgtggcgctctcaaagagctggctgctcacattcaggtcagtgatagactttaggagaggaatcctccaaggcctgttgacaagatcggagtctttttaccaaattccccacttcacggagtacgagattaaccacgtgggaagaggcaaagccagctccaagagcattgaacagtatgtgaaaacggattttaaatataagaaaggcttgaacaacttaacggaggagcagaaacaagacgttgaggagttttgcaaatacttcccaaatgtttcgctagaagttaaagtgtacgtcgaggacgaggatgaaatttatgagggagatttagtgacggtggaagttagactaagaagaaataacttgaaggataaagagttaattgggccagtacacgcaccattatttccatacgtaaagtatgagcagtattacgtcctgttaactttcccgcttgctcttaacagggataaggatacctcaaatcacgtccattcaaatgaatctagagtaaatggagtggtttcgcaagatcttttcgacttagtcgaggaagtaaaaggtaaggattgggagaataacctgctgttgaacttttcaatgacgacaagccgtgaggctgaggttgtggaaaaaatgcagattttagcagagaaggtgggccaaaacactatttgtgtaactgcagttaacgactcttactttggagctgaattctcagtgcttaagaagttctacgttaacccactcaacttgcagaaaaaatacgaatcctttaagatccaccctgaggatatgaaactcgacgaagatgttaacccaattaccaagatgattggagagttactgacagctgaatcttcagatgaagaggaagttgagtatatagaataattggcattttaatgttattttcaaacaaaaatttattatgtgtatatttatgtatatatttgcttaattaatccaatttataattactttatcaaatttatctaaaatcattttgtttatttagtagtaaaaagtttgaatcagcgatgtcattgcccatgcacgttgataattaaatttaatattttattatgaagtctgtggacgaaaaggatgtgaagttatcgatcaagaataaaataatagaaaaaatacaaaaaaacgcagaggagttcagggaaaatgaggctgataacagtgtggacttggttaagagtgacccccttggcctgaatgaactgataaaagccaataaaatactagagataaaatacaatgaaacatttgaatccttaacgaaagttagggaaatagtactgcagttatcggagcagatcctggataaggagtttagggtaacgcagctggagaagaagctgcacgagtctgaaaagaagataaagagccagagagatgatttgaggatatatgaagagaagtttaaggagatttggacgaaaactaaagatgagaaggagattttagagagccaaattaagcgactgtgtgagataataaagggaaaagactctgagatactgttaatctcaactgaaaattcaaggcttacaatggagttacgggattcaaagaaaaagaataaggagttgttaggtcagctggacttgacatgtgataacttaagcttgattataaaggagactaacgagagggagaagatgttgaacactttagagtcagagctgaagaggaagcaagtcgagaggcaaggactctacctaaacgagataaacaggaacaagaagctctatataaacataaaagtgaaggagaacatgatgtctcaaattatcaaggataagaacaaccagatagctgccctctcaagtgaggttaaggttttgagagagaagctggacaggatttccactactttcagtgaagtttcaagttcaaccactaaacaaaataaaacgctcgcaatcacaaatgacaagatccagtgcacggtgtcgtcaccgtgtaacatgaaaatggtcaatggaactgctaaaattattatctaaaaattcatatacccataactatatagttgtgtatcattcacgttatgaaaatattagaatcagttaaatgagggtgggtttgagtcgtgtacacagcgccactcgttaaggtactgttttaggtttttaggcttatatcgtttaggtctgtagtgtattccttgccaaatatacctccctccaaagccacggcgtttctttgtaactccacctagtggtctctgactaactgggatttcattcagaagtcttgggcctaacacgttttcaagctcagctctcgtttccagagaacatatgtcataaggatccagaagaaaaagtaatgattccaaaacttcctttgtttcgcacgaatggaattcatgcagtgtgatcatatccttttggagtagatccacgttcgttttgtaggagtcaagcgcacacttgattgattcttccatgttctttttaatgaaatgctttactgaaatcagttcaagaatcttaacttttagtctgtaaaccttttttaacccatctttaataatacttaatctctcagaaccacttaatagtgaattatatttgtcagctaatgtctgtatttcagtgggtgcctgtgtgattaattttcctgtaatgatgtaggatgatttagagtcctcaacttgcttaagaaagatgttgatagtggataaatctttttttaaggtctctagagaatattcattattgttatgtgatagtattgagccttctgaaaatagcctaaacagggtaggatccacctcaagttccctcacaaaattgttttttataaaggaaatgttggcacggatatctttagggttaccatgtgatatgagatcccttaagttagttactagtgcactttcagttgggtttgtttcgttttttaacctctgactaagtgcaacaaacgactctaatcctgagcctttgacgatctggcctactttagagccatttagaatagccaaaatagatgggactgtggtaacttcaaacttatcaatgagtttgcaagggatacgagagatatcctcagagtagcattcaacgccttgatttttcacagaatccacgattttatcatctgttgagaatatttcagagaaatcagagttaagaaggttagatttggagtacaaatataaaaacagtggacgatttgaattcaaacatgataagtcagggagttttcgccagttacttagaaatttagacaataataacattttaaaaatgattaaaataaaaatatttacaaatgtgtagggaaatgttaaataaaaatgttgaaatttgggagaaaaaataaattaatattggaaataacgctaataacaatagaaggacaagattctgaggaaaaaattaaaaaattactaaatgctgaagataataatccatttaaaaagttataaataaaatgtgtttgaaaataaactggaataatagttggaatggtgaagtgattcggggcctatggggaaatggaattttcaattaacaacattcgatatgtaagtgttattttgccaaatgcagacgattcacatatatgtaaatttatattttgtattttcttagtgtatttattaaacattttaaaacattcctcaatgccagttaaattttaatttgtaccataatgatggaagatttttatagttcattctgtatgtttcttatcggtttcttatccttggggataagctttttcatttcaacctttactctgctccagcatcttctacattacacttcacataggctccagaggtacattgtaaggattttagtttttcttcccatatacggcggttagttttattctaaattacatttatattagttctaaattgtctttagattagatacataatttatttattgactgaagataacgattttttagttttaacgttcatactgcttttaattccaaagttatttgacctgttgtcgatgctgaggaacatttgggaagggtttttaattcattcgtttttatttttgatgttggagtactgtggaggagaaacagcctgcggagaagcaatttctaaacacccatcagtgataaggcatttatggccgctgagtcttatacagtttttctcactaaacgaggatattcctctgaacgttggatttgtaaagcgctgtaagatgtgcacaattcagtacgtgatatcccgtctagtattttctctacttctgataggggttcacatcagcggtaataagtggtctggaaccctttcatttttctcatctttaattttaagtattagtttgtatgttgcactttactccttggctcttttttactttgcaattagcagtcatccagctctggcaaaggcgaattcactcacaaagttcttttccctaaagctttgttttgcattttcattttaccaagggttaattttggatctcttcttgagagtgtcatttgagcgctcagtgaggataaaatcgtttgtagttttggtggaaactattatttttgcgctggttcagcataacgcatatcgggtaactgagttctaccagccgccaaaccagcaagattttaacagtttgaacagatttgagggccttaccaaataccttcaattctgcctggacgacctcaggacgatgaagacttctgagggaatgggcactatattttcaagtgctggaaaggcgcttgacatgtcagactttttcaccgatacgtactataacattagtgaaaagtacaaggaacactcgattttcgtatcacacgcagttattgactcggatattgtgctagacacaaactcccaagaggctaaggaggttgagctgaacaccgtggataactttgcggacttccagaaggtcaaggacgaaatcgacaatgacgaacgttgtaatgaaatctctaagcttgagtttatttaattttttcaacacgtatatggtacatatgaaattatacagttattggtgtccgagcgatttcagttgtttgttttcgagtttgagctcctcaaggaccttcttgtaattcttgatgtttttgttcaaaacgtcctccatggggccgaggaggttaatgaagttctccctctccaactcaacaaacaagcatttcccctaaattacttatagtaacgtttaacatacctttgccttaactgttgaggctcttggtttctttaggatgaaaccaatctcgccaaaatagtctcctaaaccgtggaatatagcattgaataggtgttaaaaaattgtataacaaagaatttagataaaaaatacctggattgtaagacttgacaagtttgttctcaacaaaggattcagcctgtccttcaaggaccatgaagagacttgagccaggctcgccttgtttgataacagtctcgtcctcataagtcctctcaactaaggcgtcagcgagtctgcaacggtcataggggccgactttcttgaagaggtcgagttttgcgagaattgagtcgtacttctccctcttcttaatcaccgccattctcacgacgtggttgaaggtggtcctgtccaaagtccaaaggtgcatttcagtcttagcaacgacagttgcagcccttggggaattgtacctaaaaacggattagtggaaatgtataagtggtaaggtagttcagacttacatcagggccaactcgccaaagtagtcgccatcagtcagagtgcaaagaaattcctcagcaccagaggcctaaaatatatataattcagaattaaactagttaaataaatggaatgttgaggggttaactagtcctatatgaaactaacggatttcttggtgacttcaacggttcctgattcgatcaggtacagcttatctccgtcatcgccctgcttaatcaggacatcgccggcactagaaaataatttaattctatataattactttgctgctttgaagtcaaaggctttcaccaaaagatccaaaccagatgaagtaacaccctaaaattttatattcaaaaacatttttaaaatctcaaattgtatacaaaatacataaatacatacagagaagaggaaacaacttttgatcatttccatgatcttggcctgttcttgaggagttttctcgtagttctgaaaagaaattaatatatcttttatatcttacggggatcacaacctttgacttgctatggttgtcgccaaatacttcagcggaaacagatagcctgggattggcgcgggctagtttcatggcctatgttaaaaattagaaaaacgtgaaaaaatcaaaaaaatgagtaaactaaagattaaaaaatacctcatcaaattcgtattcgtcagaagaagccattgttaattaattgtacaaaatgtgaaaaatgtgtatcaacaaaaaatcaagagttaaattaaaaatacagggtgtttttaaaataaatttacagttaaaatattttaaaattttcgatgaaactcattttaacaaatgattttgtaaagaattataattctaaaattaacagatgggctgagtgggtgtaatgatacccacaaggagagaatctattgaatttttagattaatttttaaaatctaaaaagtcagagatttaaaatttttgtgttaaaatttttatttatatttaaaaattaatcgaaatcaattgataattaataattacatgaattaactatatcaataaacatatttattgatatgcattttacagttagtatttgaccacataaattggcttttggtgttttttcaaggtgttttcaatttaaaataattttccgttacatgaatctgaatgatatgtattagtttcagagtgatccacaattgatcttctttggattccgaggcttctccccaatttaaaaattaatttatgctaaattattttgatgtgtaagtgatttttgcgatttataatagaactagttgatttcgggttagtaggaagaattgttctagcccccatccattttctatttttctcaaatcgattgacacaaacaccccaaattttgtttaaataaatttcagatcctgttttttaaactaacttttcttttttgtaaaatatatccattattttaaagtttaaagtaatatttttatttcgagttataaataataaaaatgaactcccctttccataaactcttaatgaagagccaagggacgtttattaacagacccttggtttcatattattttctcctctcatattattactccttacttgcaagcactatcggtttctttagtacactggtatattttactttattttctttgttttatataactaatttataatgtttacacatgatatattgttgtttctggttgatattgtgttttagttctatagtccttcagtctaccacactggaaaagtcggaggtaagtaaatttttcatgaaatttttttagaaagagttccaactttgaatgcagtacgtgaagttgaagagcttttaaagcatcatggatttttaaacgatggtacatcggaagaggcttacaactcccaaaattacctggatacattttcatttgattttaaaaatgtaatgaaaaataaggaggaaaaactcaagaactccaccatttcaagtgatggagatacaacgtatgaatacacaaattaattattttaataattttgattatataatgaaataggtttattactgatgactgtcccattagtgatgaggatgatgatttttcgttgtcagacttggacgaattcgtctctttaatgcaaaattgtaaaatggaagaataacaaactaatgtagtttcttttaatacatagcatgcttgtatattttctgatgataattaatctaatctcaaatagtctcaaattttatttatataaacacaatatacataagtagtgtatagttggagtatattaagcaataaggggagcgtcggataaatctacagtttgacaaattttacaggtttgtggattgtgacctttttgaagacccaaaccgcacctgctaacaagaaaactagcaagttcatcagtctttttcatgtcaaaaggtgtaaaagtcctcatatcaatggcagggtcactaaactcatttgaagcttgagttgatgcatatccgtccaaactattattggaaccattgtccttattcaattcatctataacaatgttatatttgaatattttaaatgattaagtataataataactgagtagagcatgtgtgggatagggtaaaaaatacattctttgaaaggatcttcgtctgagtttgatccatccattgcagtgctttgactctttaaagtaacggaagagttctgcatactgaaatttgaagtgttgtggtcacttcgactagtgatactattctggaagggaagtaacccagggtcaaggccagagtcaggatcaacatttgatttcttactactcagccgagattctaaaggcttcatttcaggctcatcttcaagctcattttcctgttcaagttctaaatcattctcatctaagtcgttttctccattaaagtcgtaactcttctgttccataagggattcgtcctcttccataacttcttcaggtttttgtggtccctcattttcagatacatttttagtagatgattttgtacatctgtttcccattatagttcctaattgtggttaaaattgagggaaaattaggtaattgtagaaccaaaatgtgtgagggtaaaaatagtaaaaaatgtcataaaaataatacttacgttttaaaaaatgataaattttaaaaatggaatctagaactaatgtttaaataggtgtaaaaaggtattaatactcagtagattgatatagagaagagttagaaatcggaaaaaagagaaatagtctggattctagactagcaaaataataaattgtgcaaattagtataaatcttaagataaggaaggaattaatgcattagattatcaatattgacattggtgcgcataagtgcgcattaatttaatattcgctcttaaacgagcaacatcgtatcaataagtctcgtcaaatttgaccttaatttggttctgatttaaaaaattcttctggaatattttagttcagatgtgtaagtatttttacaatattaagtgatgtcggaatcctaacactgtagtgggtatagtatggccgaagaagtacataactgattatatataacaatttatggaaataatagtaattatggagaaagtttagtaatagaaggtaaaatcgggaatagttaagtccataattatcaatatcccagtcagaaattgtctcgtttcaattcacaccctgaagatacacgtctcgaccatcaatttaatttaaaatttttatacaaatagatatttattgatttatatactttcagtgtgtgaaatctcttaaattgttaaaaagttgattttcttaattacgggtacataggcgtacagaatcagagaaaaagcccattttccacgatttacccttatcaattctattatacccccatctaactatttttataatatttaaatcataacctgtgatataattcaaatataagaaaagtaaagccaattaatgtaatatagtaataaaagacatgtgtatagcagtgtatattagtgtattataaaaattccagtaataagtgacaatatttttgtaaatcatagttttttttgttgataataaattgtaatatttaatattttaattttaatctgtaaattctaaccccaattgtaaagatttaaaatcacgtgtaaattataaaaaatcggaaattttaagcagttttcaacattttcaactaaatttaaaataaattgtaagataacataacaaaaataattcgaaataaaagttgtaataaagtggtgtaacagtagaatcccagtaaatagcccctaaaaataaaaattttgttaatgtgtgaggtgtttctttaacctcaactgttgtgtgatcataaagtgtaaattaaagtgtaaaatagtgtcagtttgtagtagaagactacaattgtaagggcttggtaattatccccactaactacaagtggtgataagtttgttgatggtgtttactttatacgaattccaaagtgacgttatagcttgaatattagtgcaaagacacactaatattcccccaaactactttattgcttggtcaaagtactacagctaattctagacaaagttctagaacaaggataagattggatcaaactagtttttggtttaatctttctgtacaccttttaccatttatatatatatttattttaattttctctattcttcccactagttgacatatttgtcatctaattgatacaaacagtatttgaagaaactactatagtttattctgtctaccggattattactatagtatatctgttttcacaacatttaaaagatatttgaacgattttgaacacatttgatcaaatttactcgttaaaatggaaatgaattacgcaaacacaaacgaaactggtaatgtgtacacattaccgtttcccaacactgccgactttggagctaagaacatggttaatgcacctcagatgcttgaatactccaatatggctcagtttcagaactacacacaaccccaattttactacaacactcagaacaattgtgttgacggtgacatgaacagcacttacaactgctataacaactacccatactacaacactaacaatggctatgactacatgtctcagcaagttacagattactccaactgttacggtgttagtggatatgaaatgtctgactcatctttggcaaagccggtttcaagcatgggtgaatctgttttggcagctaacgaatcatcaaagacctcaacttattcatataatgacttttctcttcttccattctcctcaggcagcgagtttaacaaccaattcaacgccagtgaggttgacacgaccaatctcaacactgaagaatttggtggtcttcactataacagtcctgaggaaacttcagagtacaactttggagaggagtgtaagaacgagtggagtgcagagtgcagcaatttgtcaatggtgaagttggaccatttgtctgacaagaatttgaaatcgcttgactgtgactttaagaagacaagtgatgatgactctgaaagcctcgcaaatgccagcacctgcgaaagcactccaataatgaagccattacgtgtttcaccacctcattcaccaatgccttcacaatttgtttcacaagcaccagttaatcatttaccagtcccttcaatggccaatgttcaggatttatctgaaacccagttttatcccccgcaatacttcaactatgctccctatcagactaacttcgccaaccaatatgacatgacccagttcaacaacaccatggcctgttataacactatgacaggttatgatgtaaatggtttcagcgccatgaacggttatgacatgtcaccagcccagggtatggctggttattctacgggaatgggatataacaacggtgttgtaatggagggtttggacgaatccataatagagatagctaatgagattgcgaacaacgtccagtacttgcctgacaaggacagtaatggaaagtattctttggataagaaccacccaattcactgcgtatggcgtgacgtgaacagaggccactgcagctggcgctgtaggtggtgggagaacggcaagcgcctgagcaagaactttaacgtgaaacgcttcggtgagtttgaggccatgagaatggccataactatgaagatcagaaatagcactcccgttgagcggattcaattgttaaaggagcagagggaggcggtcagaaaccaacttcatctcttcggtgcttatcccaactcaactagctaccccacctctaacttcaacttcgaatcgaacttcaacgactctaacattaccaaggtaatgaatgacaacaagaagcttcagaaggagaactgggaaaggctttcgtggacgtatttaaagactaacaaatgcgacgactcgaaccacataaccatcatttgcagactttgttccaagactaccagatgctccagaaccagaaaccttcagcaggctcacataatgcaccttatcaggatgcacaagaacccgtggaagcaatacattgaccccaatggtcttaccaagatgtgtaaacttgctcttgacaatctctatgagcgccacagatttactccttatcaccaatgggttttaagacctggcatcaacagaccagaacctgctttcgtttaactgcaaatcgatataatatactccacgatcgatatttatttattagtttaattatattctgcatactatatactatataatttttacaatatacactaactaacggatatacatttgtacccaatggtatatacaaacttgtataccatggtacatacaagtatatagtacattaagattgttttgcttttttagtttctcttcttatttggttatagttaaccttgtcaaattgatcattttgactaatttcagtctgtaactttgaaatatactcagacttatccccaccttcatcaacacgttcatcgtcagaaaagaacacgtggttttgttcagcttctttaagtgtgactacacctctaatctttgctatgcctcttctatttagccttaatttgttccttgaacttgtaagtttacgcttgatttcacgttcagggtcttttaccaaattggcgtgcaagtcaatatcgtcattaacacacgacttactcaaatacaaaacttcatcagctttttcatcagaatcagttttctgatccaattcctctgtatcaatggcatttttaagttttttctgtttgattttgttctttaatttactcaatttgctcttctttccactctgtacctgggcaccgttagaatcaccattggtaagttgtatgtttggagaatatggtaagcccatggaaattgaaagttggttaatttcctcaatgatttggttgttatttggccgtagtaaggctctcgtggtaacataccgaagatgcgccaccagtgctctctgagccatttccttgatccacgcttcttttgccaatattgcctgcatcttcctagtcacataaccttctctcctctctatcagcggaaccattaatttagtaacatcgtgtactacagtggtccccttagaacttttattgggaatgtgggttttaagaagcttaacaaagtcagattcatgatcagaaataaaaattactgttctcccgtaattcctaaacccttcaactgacaaacgtcctgctcttccaactctgtgtgtgtaagtggttgtggaatctggtaggtcaaactgaaccacaatatctacggctgggaaatcaattccccttgcagcgaggtcagttgtgaatatacacccatggttctgttttgctgcaaaccttgtaaactgtgttagacgcttgttttggctctgttttccgtggagttcagtcattgggacagctggaataagtcgtttgaaaacttcgtaggcaaacctaaccagcttacaagtggatagaaacactataattctcttgttttggtttttggacaggatgtaaaaaagagctgaaaacttcagtttaggactcatcaacaccagttcctgccttaaattagactctgaaattccatcggaatctgaccctaaacacacaagttcatagctgacgtcctttaacaataaatcacagagctcctttaacgatgactttatggtggcactaaaaaacagaaattgtatatcggttggcaagaaatcaactatgcttatgatgtcatctcgaaatccaacatcgattaatctatccgcctcatccattactatacattgttaatttttaggttttatagttaaatattaaataactagatcaaaaatacttaaaattttaatattgtgagtctccggtaacgattggctacttaaaagcgccagtattcttcctggtgttccagtcaagatgtgaagtctgttggcgtttttcttatcgtatttatctctaactcctcctatacagcatcctgagttaagctttagagggtttgctaagtccttcatctgtaatgctatttgacttgccaattctctagttggtgctaaacaaatacatcctaaaaggttagcatctattggtaggttcccgctgtatccctcgtcaaacaaatgcttcactgtctataacatggtatatttatggttaatatgagttaatatggatataacataccggtaataggaagcaaagtgttttccctgatccagttggtgattggataaccagattcttccctgaaagtgctaagggaaggactttactctgtacttttgtcaagtatacatatcctttgctctttaaaacttttttagtcttatcgtcgatatccaaatcatcaaatctgtcagaagtcagctcaacttctgcagaatcagttttctcagattccattataacaaattggcatattataaactatttataagagtttaataaagtcaaattttatgaacaatcttaagtatgtttaaaaattgaaatatagtacaaataatatttaaaaatgcgatatgaaaaaataataataaagtcgagtttaggttgggggaattcttggagaaaattttaatataaaggattaaactaataattaaataaatattctcaaggtaaatgaattgaaaataaatctgggaaggggaaaattaagaggataaaactgcttagggtaaaatcgtttgcgagttggagaataattcgtaaaaatgaaaattttttagttatttattattttttagtaaatttacaagattttagtagtttgaatttaataaacaaaagaatctctggaataatatttatgtcgtactacaaaactaaaaagcccaacttatcggtaataagtatgaaattaataattaattggttaaatgataataaaatttgaaattttatagaatattgtgagagattctcacgtttagaaaccaccatacacttacacatatgaggttattattcaatgtgtatcatcattttttatttataatttttaatcgagatttatggatttttttatatttttcctgttttttaaatcgcatcaaattttaatttaattccctattaatggatgacagttatgaatctgtttctctaaaaaaacacgaatttgaagaacaaactgacaacactcccgaccagaatggtacttttttatttagtttgttaattaattatttgtttagatgatgataacggccctgtggattcttttccgctcgggaaacttcaagaagttgaagctgagctggccaagattatatccactggaattcaggtaattccctgattatatttcattattagttccatccttaattgtatattttaggacaccagttttatgtgtaaatctgagtactgtgtaatgataagggatttcactaacaagttgtttcccgagccacaaactgatgattttggggttgatgtgcgtctcaaaaatgttgtaagggctttgggtgagggctcggtactgcctctaactgagcttgtgaactcacttaaagtatcactgggtactttttttgaccttggaccagacgataagctttataagcttgtgccggtatttttatcacgcaagaatctgggcgagccttatgtgaacctgagtgggattgtccgttcagaatgtaagcggaaggattgtatgtggatttgggagactccaacccttgaagttttccctcagcctcttctagaccaagttcggtcatcacgagaggctagaaacttaatttcaagacgttacaaagcactttcaaaactcaaaaattctataattactgaagacctgaagggacagcaaatggcccttgaaactcttaacactcttgataggaaaatgttactggataaggaacgtaaagaaaggatggacgttaaacggaaatccttagacaaaaaggtaattcaaccatatttccagttatttactatacaccaatttattaggcttaaatatttagttatttaaatgtagcaatttgtggttaaaaatgtttttgtagaaaaacgagaaattgaaggtccagaagactaattcaaacatgctattgagttggttgaaagtccagaaggctgaagatacctcggaacctcgaaaggatacctattcacctaccctacctgcaaaggaacgaaaacctaatatctttatagactgttctgacaaacagagaagtgagcttgagagtatactggacccgctttctgaattttccgagtcttcagagtctgacccgcatctgttcaccaagcgccacacctttagtgaaatcaataaccctgtaagatcagctgtgaaggaagagaacgccgagatattcaaattatccaatttgcacagagatgtttggaccaggtttcacacgtatttggagatgaaccgccagttttatgtggactcaaatgagagccgtatttgggtagacgaccctctgaataatgttgagcaggttaaccataactcgacctgtttaaaggccagccgtcactgtagagtgtttagcatgtacgacaatgcttggaaacgtccaccaatgcgttaccttgttggtagaaatagtgccctcgttaccaggtttaaccaggttacgccagaccctaacgtcgactactgtgtcgattctgacgaggactggtttgagcgctacgacgcagacgacgttgaggtcagtgaggaagaggaagaagacgatgaggatgaggagcaggagtggattgttcaggacagtcctaggccacgtgagttcagcactggtgttttcgacactgaccttagcaagtgtgtcaaggtttactgcatttacaagaactggcactggatcattgatgggaaaccggtctgtgatcagtttagcagtaaggaagtggctcttgaaaatggcattaatgtaacccactcagaatacggttttggatttgaagggtacactggtaatcctattgttgatttgatgaggaatttgcgtggaactaagatcacaatgtcccgcagcgatgttgaggatcttctcagactatgtcatgggaaacacacgaggaaggaggacctgattgccattttcaaggagtctaaaccctttgcttccatgagtgaaatcaaaaacaagttcaagaagtacatgactcgtcttaaaatcgacgacaagcctcatcgttggatggttactcctgaggccgctaaactcttcaacattcgcaaggaactcgaccggatcctcacacatcagctcaacactgaaatcctctcagaaccattcttttaatttttgttcacacaaattatacattattatatagattagtacataagttagtatatagattagtacacaagttagtgtatgattgatatattatgatataaactattattgtataattataacaacacactaatgtacgtgaatataatacattgagttatgaaaacttataaaaaagtttcaggagcaagaagatgatggcactgaggaatccggtggaaaaaatcgtgacgatccaagtgacgaaaatcttcctgtacagcccgaagttgacgtgcctagaggtgattctggagaagatgctgtggaagaaagccagcaggctcttcttctcggctccgtataagctcaggacactcgaagtgttgtcagcgctcacaggactttcacaatgctggttactaccttgaggtgtgctgacgtgagactccgcattggcggaatccaagttttgttctccagttgtttcctccatatcattggcgggaggatcgttggaagggtcaagttcctggttcttttcgtcaatgtagatgagtgagtactgtttattataggccggcaggtgctgcaccatgccaacgccgagaattgaagagactgcgacgtgggtggagctgattgggactccgagctgggacaggatgagaacaattgttccagacgagcagtcgatagtgtaacctcttgagggtgtaacgcgtgtaatgtttagtccgacggttttaatgactctgtaaccgaaaaaggcgagaccaaaccccatgagaatgccgccaatcatgagaatgtaccagggcgtggtctttacctcctcgtcgatgccgtcatagtacagaaagtacattgtggcgaaggtcgagactgcgtttgcagtgtcatttgaggactgtgaaatgattgctatggacgcaccgacgatttgaattgctgaaaacacggtctgcgtcatgtgtttcttactcttcttgatctcagttgggacaacaaccttcttgtactttccaatggccttgcggttatttgacaatttagaactgtttgaaagagacttagttacgctgtttccagatccgttatgcccgctagagtttgatttaatgctattgtttgacgtttgctctcggtagtctaggtgcatattcgaatttgtgaagcttctgctcttgttaattgaggtcacgaaggcgctttttatccctgtcaaaaagcggtttatgctcgagtctgtctgagtcattgcgttgtctagtgagtaatcatctgggcttgaatccgctgaactgcctccgtccggtttcaatcttcctcgattttttgcgtttttcgcatcttcaggcggctcgccttctttataatttttagaaaatgcagttgagggtaaatttctggaagttgaattcttgtcatccttattttcgggatcttgacaagattcatcagggttttcaacatccggtgaacaggactccttattgtcctcctgccctggatctgaatgctctttatcttccgatttttggttaaatctatgtttttttagcctaaattttcggctcttttttttatttgaccttgtgatggtagggtcaatattgtgtaatgattctatataggaccagttgcccttaattctaaaatgtaaaaccgtgtatgaaacaattgtagaagctgtggacaaaattgacagcactattaaaaccgataaaaacttgttccagtttgacctggcgaaccacacgcgataggagtctgcagatgatcccatgtttgatctgaggactgagttttcgtatgcgatgaatatcgagagcggaaccgaaaagatgatgttgaatatccagtgaaagttcatcatgaccttgaacgaatctctgcgcttaagaattaactcctggattatgatgtaaaaggtcgcgctcacgaacaccgacaacatgggcactataaaccacgagatgacaatgtacagcagttcaatccagcgcactcctgaaaaacggcctgaagccactccaaaaccagcaagagctcctaagagactgtgcgtcgtcgagactggaattccaaacagagatgcaacggccaggaaaataaacgagccaagggaggaggacaacattcccagcgccaaatccctaggcgcatctgagaaggcagaaaagtttaaaatttttgttctgattgcatcagaaactgttccgccgaggaaaatcgagcctagaatctcaaaaacgaaagcaatacaaattgccgaccgaaggttcagggtcccgctcccaatcgacgtcgaaaaggcgtttgccacgtcattcgagccaatagagacggccagaagactacaggatattccagtggctatcaatacccacaaaagttcgggatgtgatgatgccatacaagtccggggttatcctaacatttggaactactaggtttcgtgaaggtggaaagaaaactacatttaaatgttctgctcatcctttataattattttcaagaatgtctacaacttatattctgtttcctctcggagagagaatttacaacgtggcgtcccccatactatagcagcctctccgaattcttgaacatgcctgcaggtgcctcaaatgacactttatttcttccttaacgcaagcacgcgactcttagagactttaaaacgctctaacccatgaatagtaaaaatacgtgcctgtgcgtcgacaaacttaaccagttacataacacaatccacacagaactcactgattgcaaggataaggtttggaattttaaaatttcaagtttaacaaaggaaagagattcgctactgcttaggtatgacccatttttgctcgttttattcacctcttatacacatttccctgatacaccctgtgtaaattttttttcctaattttcaccttaattttttatataccaccgttaaagtgtattttgaattatctttattttatcgttagtatatggctaaataaccccaactacctaacataattccctatgtactaattcacggtgttgtagaaacgaggatttgaggtcaaagttgaccgatttacagtctaagatagcttcggacccttttatggccagaagatattacgagctttgtaacaataaaccctcagaattcttggaaaatagcgatatttctcaagtgtataagcagctttacacatatcaggtacgaagtattggatgatagaacaattttcaggacttgaataaggagttaacggaacgtctgtcactggaacagatgaattccatgtcctggaagcacaagttttacgatctagagaagaaaatttcatcccaaatttcggaacttttgcagctgacccaggctggaaattgtgtagaaaccacagattacgccaagtttaaaactgaacattactgtaaagtagcaaaggaagccttagaactgctaaaacaagcccaaaacaggattgaaggagaccgttacagtattatttacatagatttatatttaattatatactactatgtatactaaatatgtgtttgtaggaatagaatcctatatggacagagtttctgacttagaagatcagttatcccagtatcgtttaaggtttaatcaatcacaaatgatttaaattctttgcaactggcctttgtaacatagttttttgtaaagcattattgtaaaataccttttgtaacatagattttttcaaaattttgtaaaatattggaaaatagtttctattatgatggacaaagataagagagttaaggatctggtattgcctagtatgttggagtacaaggtgatggaggatttcaggcgcacactgtcaaaacgaccatacgaatatttggaagatgggaactacgacgtgtatttgaaggatactaaaaagcagaaggatgagaaggagccatacgtatcagtgcacagaaaggagctaattaagatatactcagacattttgacactgattaaacataaacagaagcatataaactcacaactcgttaacccgaagttcgatattgcaagacataactttatttgcatttgcaaaaattcagtcaagttccatgactactatttgaagtctggatctccaccacgcagtgtgtctgaactcaaatctaaacctgaaaaaatgcctaaagttccagaggaaaagccggcagttaagcccaaacccgaaactccagagttaaatgagactaattatgaaaaggcatatttggtatcaacatcgaggactgacgagagccaacaagatgattactactcgcgtttagatacctacttcagccttaaatcaaaggaacacacatcgccatcgactgaaagggttaaatcgaccaaattagtggataagagtggtaagggagtaacatttgcaggagttggcagtgtgcaaaaaactagttcatttgtagatcctgtgaaaaaagctgattcacttgttgaaagtttgcaaaaaagtgaaacgttttcctcagaatcatatcctgagtcaatggaacgcaaagatacgtataaagtcgaagatttgatgcaactcccatcactgaatattgaggctttgcacccttcagagtctcgagagagttcagtggaatcagttaaggtaaggccaaaaccaagagaaaggaaagtaaaagatgtgaaaactggagataaacaagttgaacaaactgtttatggagttgatgaaaaagtagataaagaaggtgaactggacttccaaaagagttcattgttgaataaccaggaggctgagatgaggaacgacttgttgcacttgtttgagagtgtgggagtcctttcagacttgccaagggaaagattgcttgagttgagttctcactttaagttgaggtcattttttgcaaaaacaagtataattctggcaggagaatacccgaaggagttttacatagtagcatcaggtacagtgtcgagttatgcttatgacccaactgacactgaggacacttacaggagaacatatcttagttcagactactttggagagtcgttcatcatcgatgatgttccgagtgacgagttctacgtggcagacacacacgtcacactccaggcgatgaactctaaacttttcagaacactgttggcagaccagtttaacgccttcaagtgtagattaaatgagcttaagcactatgccagttatggagcacacagacttggaacagggaagtttctcagtaccaggtttggaactgctagattgggaaccgggaaatttggtaatgttaaggttggaactgttagattggggactaaaattggaacaaatcttaatttggataggtttatgacagatgagaaggaagttaaggcatacacagttttgggaaaggagttacttgggtttatgaagagtttctacttttttgcaaagtatgagcagatgaataagttggctaaaaaggtaacgtaccaggagtactctaacaaggagattttagaagatgtggctaagggtagtggcttgtttttgatattcaagggtagaatatccctgcaaatctacgaacaaagttataatagacaactggaacttgtatcctttgcaccaaactcgtactttttcaatttcagacctaatagtgaaactgtagccaacatactagacaggaagtctttagttgtaactgaaaatgtaaaactgctgtatttggctcaaaagtatgtacaaaagtgcttatcagaatccttaccgcaaatgacaacgtaccttgaaaatctgtacaaatcaaggtatatccacattgctaccgttggtgataaagttacgagtagcaccagtagtgatgaggatagtgaagattcagttgatgatatagttcctgacaaaactgcttcctcatcagaaggcactgaatcatctagtgatgattcgcccagtttatctgagtctcctgttgcccctaaggatttgtcagattctccagaaccttctaaggattcttctggaactattaatgacactgaacctacgcctgaggatagcattgaaagtataaaggaatcaactgacagtgtcaagtgtagtgaacaaactgttgaggatagtgaaagtgtcaaagaaagcgagcctgtccctgatgatagcagtgaaactataaaagaatctacagacagtgttaaagacaccgaccctatcattgaggatactataattgaggatagcgagagtgttaaggattcagaacaaacccttgaggacagtgaaagtcttaagggtagtgaacaaagtccggaaagtgcttctgaagatggtctgatcgtctcaagacggtcttttgaatatcctgccgatgtttcaattcgtgggtcaacctacagaagtgaaaaactcgatagttcaagaactggctccaatttacagagcagacgtgatagttctagaagtgtttcaaccctggaaaataagcttgatagttcaagaagtagtaaactcgagtctaaggagtcgtcaaggtcgagattatcgggtggctcattactcaacaggactgtttccagaagatcatttgaggatccagctgaagtttcaattagaggttcgacatatagaagcgagacccttgatagttccaggacaagtttggcaagtggtgcatcagttctcaataaaattgtatccagaaggtcatttgacgatccagtggacgtttcaattcgtggatcaacttacagaagtgaaaaactagatagttcaaggactgtctcaagcttacaaactaaaccttctcccgttccggatctcgaacgtatagtatcaagacgttcatttgaggatgctgttgacgtttccatacgtggttccacatttaggagcgagaggcccgacagttctagaagtggctctagtttgcaaaataagcttgacagctctagatctaaccttacaagtggttcatcggtgcttaacaaaattgtctctagaaggtcttttgaagaccctgttgatgtttcaattagaggttctacgtacagaagtgatacactagatagctcaagaaccagttcaagcctggaaaataaacttgatagttcaaggagtagtaaattagggcctaaggaatcagcaagatcaagtttaagcagcggtagtgaacgttttgtggataaaataatgaggaaaatggaatcatataaatcactaatctactcatccgatacaccaaaaaccacaagtaaagatgaaagcgctagagatttaactgatggtagtgttaaagaaagtgttaaggatgagttggattatgaaatgatcaggaaaaacacattaatggcatcacacatgttgatttcggatactgagcttacgtcaagaacatcttctaacgataaacctgagtcatcagaacacgtagtatctgatcaagtttcatcatcaagagcttcttctggaaggcgcttgtccaaaactttttcatcggggcaagttgagccagttgtgaacattagtgaacaagtagttaagagtttggaaacatttgtctcagatgagaataatagagagagggataacaatttgtttgacagcataaaggaaagtgacgctagcagcgtagcaagtgaagttaagttcatatttaacattccaaatttggaggatgtgaatgtaccgaaactgaagcttgagactcaagatgttggtgagaagttggatagctcaagagttgatggtaacgataactttgtaagtataaaaacactaccaatgtataataatttgaagcctgatattggtaaggagcgtgaaattaagtatgttgaccaccatagcctggatgaagctgtagaggcctctgagaacatgtttgaggatgaaaagcaacaaatgtcagataagatagttcacagacaaacctcttcgtcatttttgctaacctcaaattctatcaactacggagatgcctcagcagaaaaaattgcgagattggaagcactggatcagttgataagtaaaaattacccctctgtccaagaatctattaacaccgtagtagaagttatacgattaaggtctcttaatacacagtcttccattacaccgccggttcttacaccctcagttcattcagttgataatgacatggaagtggaaaaggaggatcaattacagactgatatgtctgaaaaggttgaaaaattggatgagtttgggacaaaatcaccatcacttgacattagtgagataccagaccttaaaaaaatattgtcaaaagtccacgaaatgtacgttggcaaagacgacaaagaacagtcactaagtggatcccggttctcatcaatagacgatgtatatatacacttggacaaaattgaaaaattatattccaaatcatacaccactgagatggatcgcactgagcctaaagttgatgatgttcctaaaccccaacttgacgttggtgaacctgtgggtagtatgggtactatggatagtgtttatggacttgacagtatgtataaatctagggatgatgtcgaggttgaaaaggttactgaagatcctgaaattgatgttcctgagcttgaacttgttgatgaaactatgggtagtatggatagtggtgtgtatgggttggataccatgtacaagtccaacgatagtatgtttgaattggaaacattgtataaacaaacttcaaatgtggttaacaaatccctatctgatgaaatttacgatactgacaaagacgaagttttagagcaaactgaacctcaagataccctactcaacaccatcagcaaatcatttgatacgataacccaggaattgacagtggataatataaccaagaaattatcaatggatagtataactgataaattaagtttggataacttaacagaaggaatgtcaattgatgatttaagtaagaaattcacaatggatagcatagctggaaaattatctgttgatggtataactgagaaactgtctgtagatggaataactgagaagtttgaaggaataacattggataacctgagtagagagataagtaacattggtgaagagattacaggaatgctttcgtctaaatcaagtgtgagaagtggtttagggcctgaggaattggctaaggatgaagaagttgaagaaaaacaggaaccgagtgtgtttgaatcttcaaaattaatgatcagtagcattttcgataatattacaatttacccatcaaaaacccagacaccaactgaatcatctgatcagacacaagtggaacaaaaagaagaacagtatcaacaaaatcaacaagatgaggaatatggtgtagtggagttgagtgagaacaatgtatttattgacaagtataatttggtgaggagaataagcttggattcatcgtcatcatatgttagctcgacgagtagtacggaaagaaccacttcagatagtgggggccaaactcttgaaaattcatctggagaatacacacagccaaaccagtcaattgaatacagtgatggttccagccttttgaacttcccagcagcccaagtcattgactccactgatagtgttaatcttgatagtgctagtttagatagtggaacagtggatacaagtgctatggatatggatcatagcgtgttagacaacagtgtcaccgtggacaatagtgcaatggatatggataacagtcctaaggatagtgctgatgtgagttatttgaccagtgataaagggttacactcgagtgttgagtcgtttggaactgatgatttctctgagtcagtacactcaacagattcctcagcctcagtaacaatggataacagtgttaccttagataacagtgtgactgctgacaatagtgttacaatgaaggaaagttcggagtcaagtgaattgtcagaatctgaactgacaagctcgttaagcagtagaagcgacgttgacaagggcacaaataccgtaagtcttagtgaggatactcactctctctgttcatcattaaatacaactactgacacctcaacaactagcattaattcctcagataatactacaataacggatagctctaataccagtttgactgagagtgtgagtatgagcgattcagttgacactagtttaactgaaagttcgagcagtagacgaacgagcatggatagtgatttccaagacggcactggacttaataatcagtcgccattttctggattatccgataactcctctattgtttatagtaaacagttttctgacttcaatgaatcacaatctgatcaacaagacttagaacagcatgattgtttgggggaccaaaatgtagaacaagataaatttagagttgaggtagattcacaaagacaaaatttggaacaagataacttcaaaggtgatttagatttagaaagccaaaacttcagacaccttgaatctgatttagagaaccagaattttggaaattttcaaagagatttagaaaaacaagattactctaaagataaagtgaattctgatgaatttgagggtgattatgatgaccaaaaatatgaagatgagggaatggatgaagaatacgttgatacagatgaaacagtagattcatatgaagaagaggaagaggaatacgatgaggagatgatattgaacataaagaatttattcatgtcaacattaaagaataagtacaagtcaataggagcctcatttaatgcaatggacctagaatgtacaggaatggtaacttgtgaagtgttcttgagtttcattgagaagttaggaattggagcaatagatcacagagaacagaacctgatgtttgaactgttgaaggaggatgggaaagactacataacagttgcctcgttttacaggttcagtggggaatgtgttaccacattacctgagttgaatcagcactttatatctatttttggaagcagtagaatggcatttgagcgttttttcacaaccctaaccaaggcaacgatgtgctcaagagttgattttgttctcattttgactcaggttggcatacctgaaaaggatgcaaatattttgtttgatgctgttgacgtttgcgagaaagattctgtgtcagttttcacaatcctaaagattttagtaggggattgggatgcagtaactgctttcgagtatgaagaaaagattaacaccaactttaatagactgctgacatatctctcacctgagactgataactttaacagtgaattcacaagaacactctcaagtcagtttttcgaacagggactcgactgctcactggtaaatgactcttacgaagagttttacattgacagagaattgttttactttgacgaactttactctttgatctcctctaaacctgagtttaaacaggtatcattgccacaaaagaggtttatcatttcactcttcaacataataacatttgggccaagcgcagccagttcagaatcagatgaagactccaatccaccagaagaattcgctggggaagataagatggaacatgtggatttaatatgtagtaatgagtatgatgtgccattgatagcattgataagtggtagtgcagatatgagttttgaaggtataacttaccctaaacacgttaagtttaatggcccttcattcccaaattatgaacagtttatacaatcagcacatgtttacacaagtccagagcccattccaactaataaaacgccgtgtaactataacattacagttgcaaacccacaaagtaaagcacaaggtagggagaatgttgttggaataatgccattaacgagtttcatatacaatgttataccactgttaaatgagagaagtagaagagttcctgtcatgttccagtttttgaaaactgtatctagtttcggtgtttatactgacgaggagttggatactatagtggcagcttgtacggtcaggcagtttaagcttcacgagactgtgattaaaactggtgaagttccaacgcacttttacctcatcttcaatggctcagtaactattacaaacgagtttaacttccaattcaaaactgtatccaagggtaacttcttctccaccttcgatattgtcaataatcaacttaacaccttcacagtctacgcaaactgcaccttggtgcttctaagttgggaacgtagtgagttcttcagggtatttacaaagtactacacacttctcgatcacgactcctgcaatatggatgactttcagatccaggtttctcaaaaaagcattgataaaaaagtctcatttgctgagacaccttaattttttaacacacaaacattaatagttggtgtttagtaccgtttagtgtatattaattgtagtattgtatgtagtatatagtatacattatagtatagtactgtatatagtatagcagtattactaaggagtatttattatagtgtgttatactgtgtatagtaattctcaagtattctacattctaccaacctaaatatattttcatcactagttaataatatacatgtgtagtgtagtttattaggggtggttattaggtctttgatcatatctaaagtgataattatcgtcttgaaagtgttgcatttgcgtgttttgcaaattatacattttgtggttcatatttcccattgggttcatattgcccatcgctcccatatttgccatagagttcatattcggcattgagttcattcccagcggctgttccagaggagaattcatatgatgggatcccatcatgcccattccactcatcgtattcatattacccatgttattcaaattatttacattactcattgaatttacattgtttacatttcccatattgtttacattagacatattaacattgctcatattatttacattgcccatagtgttcatgttcatattcatgttttgcatagagttgacggagttcattggatataccataggtacagaatagggatgatagtgttgcatatgaggttgaggcatttgtcgtctcatcatgacttcttgtctagttctgtacattgaggttgtttctgagggtgttgagacctctgccaattgtctagccttttgtcttggtgtggtatccatcgatcctacgtgtctcttgcgttctgttggagttgagcttgcgttgctggcgttgcccatagtgatgtattgagtgggttttctgacgatttttttgggtgaaaacgagctctgattacaaaccttgcctttagataatgaaacctgagtaaaagatgccagtaatgttggcacattgttttcgtcaggttttgtgttagttgacaagtaaatctccttggaataattctgaacgagttctgaggtaaaagcttcctggttttcaactgactttgatctttgcttttcataacttgagggtcttgactttgtaagtatcaggttaatgtcagggtcgaacattttcccatacaataagtgaggcggtggtatgaatttgcccaatgtggcaattgataaagcgactctcctaaccctgtagtcaggtttaatcctaccacaatagaagagagaatataggaacatcttagttgggatgccgagaaaacctatcctaagctgtttgttaatcctggttgaaagctctgaatatgcgaaattacggaccacattgtcgtaactactcacactagtcgccaaagtcacggctgaattcagtgaactaaacctgtgagtggctccatatttatcatttccacacaataaatacctagtcttacttgtgacatcaagactctgctccacattatcatcaccttgtgtttgcacatttgacaggatgaagtttagtaattcttgagggaaaatatggttatgagggttaagtgataaggaagcttcaactttaacgttgtgtgggaccaaaaaaagatcatttttatgtacattagagtcaactttattaacaagttttaagagtagtctcttatcgggttttgggtctggagatttgaatcgtgagaaaaacgactctttcttacttagcaacggggttgaacaagtatacagagaactcttgtcccttaaataactacaaacttctccaaatacattctttattccagtttcagacgatgtactgggttgacttgttggtgggccagttctaggtgaagtcatacggtcagatgatattatgggtgtgaatttaaaggttttaggtggagggttaatgaaactgagtatagttttcgactgtttgggtgagagtatttttttagatgagtttacaagacctcttggtggttttgacattctgtaaaacgcctccttacaggcttttggactaaattcacgtctcaaaagtcctccagaactacttcttaaatttaaagctattgaaattaaaggccaacatctggactcaagcaaccacgtatcaacaagttcaaagtcagcctcgttaagtgttggttcttcccactttagtacaagtttctgggggtgtggtgactggactgatgagttatctatgaaatctctgtagttcacactaagggataaaggatcaatttcgtccctcggaatacgtcgtatcggtaataaactactcaaacccgttggtgcagtagtcgttgtggttgccggtttcggtaaaccaactgcgctatccctaacacttgcgaacattgttgcctttaatgagtgtagcaacaacaggagggtgttgtagtcatattcatgtttaggatttagtgctgggagtgtgaaaacgtcaatttcatcatctggtggtctgtgtaattgcgggtaaagttctgcacctaaaactaccatctgattcacagttgcgtcaaccacttctttcttagcaatgttaactgagttagtgtttacgtttttatacacaggaactgtaagtgccaataattcacttctcctcctgggaacatcttcaactatgtcttgctttctaaaatctattctccttcctgccactattctggtacaataatccatcaagctgcttgataatactatccctacttccctgccattaccgttaactgagccttcagagctaccattggaagaactagaagactttatagaatttccattatctccgttaacattgttaactgagtggtgagagtggcgatgtttgccatgcactttaacggatttgtggcggctgatagtattaatagtgccattagtaacgagtttaatattaatccaaaactgttcaatattgtacgagcaaatcttggcaggccagtctcttttaagccgtttacgatcaataatgctagtagtgattgaatttgagatttctttggcaatgtgcgatttccagcgtcgttcttggtaatagtctactgccatccagttcatttcctgcataatcaggtcccgataactgcgactgcgttgtgagggctcaggcgccaggatgctgtggccgtttttcaccaaatggtacgtataacgccacatttcaaagtcactcatgcccagtttacgcttatatgaaccgttaattggggtttcggaactgtgatttggtgtagattccaaaactgagttagatgtagtattgacctttcccatggaggaataagatgaactattcagcctttcactggtggaattggatgagttgtcctgttttttaggtcctggtgggtcatatttagggggaccagggctgttaacggaattcgggccattaaattcagtagatctgatcatttcacaagattcgtttgatgggttggccccgtttgacaaattggagctgttcatttgactggattcatgtgagaaattggttgtgctgagggaattgcgatcatctgaatttgggtcggaattgccatcatctaaatcaagagcattaataatttaaaatattaataatttgaggggaaagggagtagatatatggacttacgaaagtcgagataatttcttattaggggctgagcggactgcgatattttgaaatctttagtgtcccgatctacacccattttttaggtaagattacgtgttgtatagtacacattttaaaaattagcttgaaaccttcaaattgctcatggcccttaccataacattcatacctctacaccacacaaatataccatgccattacatatattctcatatttaactagacgaaaaatctaggcttaaccagtgtaattggtatattatttatcaaattaaagctagttaaatgtgaggtcgccataggttataaattcaaatgggaatgattccacgattgatttcctctcgaaagtgttttccaggaaatcctgaaaatcatcctggtcctaaattttttattcttctttccaacccaccttaaacaaaaataatagagtgaatgaggagttaaaataacgccagttcatgctttttaccctcctacttgtgaaatccctgaatatatctacaaattccaaactccgaaatgccttctaaactctcattaatcacatttttataaattaatattgattatcagctaacaagagtaaaataattaataattaaggagaaattttgggattttgtgtagattgggagaatgtgttaattatataattagtaaactaagtaataattaggtaacaattagctaagatagtactttacagtataggtgaggatcattatagtacagtcttttattagttgtgccaaatatatagtacgatttattgaacaaatttcctccgataatcccgttaaactggcttagcctgaacattgacttcacacattcccgttcaattcggtccaattttttcttattcgacacccaaaccaacaaatttctaaaatttcttccacttttaattcttacctcttatcatccagtatttcacgaacctaacacacattacatattataattttagtatagtactaaatatataaatgcgtattagatgtgtataaatagataattagagaatacgtcagagatgtgaaaaactccgtctgggaaagcaattgagtgaattggtagatttgagtcattgatgatttttgaggcgcagagtgctgcgctcgttggtccgaaatgtagaaatttagtacaagttttaagaacatagtctgcgattatgaagttgtaaattgagaagactgcatttaaatcatcgtaaaactgagctaatattactgaaactgctgaaatttcatccaaatcaaccaccccgttaattaacttctcgaaagtgtcaagatttagtatactttcatcaattttcttgttccttgggcttctattccggatttcaagctgttctacactaaattcaggccctagaacaagattcataagtgcttgggatatggccatctgcgtcgacctcaacacgcatccccaacccttatccgtgtcaatggttacaacgtcgtttgacaagtttaaagggctaaaaatattaaaaagtcgccttcttttaaagtttatgggcttcgggagcttatattcgagcccatatctatatgtaaacaggattccaaatctggattccagccttctatcatataatacagtaacattttctctaactacattactcatttacttttaaaatttaatttttctacattaattatctttacataaatttttttcataaaatttttacattactttagtgtatgaatagcttaaattttaaaattactgcgattttcacacagaaacaccaatgaactttcctcaatatatataatttgattaaaatatataaaaataatctagaaatataaaatattttgaaaaagatttattgcaagtatacacccccaaggctgatttaacccgtttaatattttacacaaatttaaaataccaaaaatattccccaaggacttgacttcacttgtttaaaacatgatttaataaattactatatgcgattctttaaaatatacatatcctaaccatcttgaaaacctcccttatttcactttcacctttagttattataatagtttattccctaattccttgagccactaccagttaaagttaaaatccatcgaacccttaaaaggaatccctaatatcattgaaaagtaaaacgtaaccattgaaaagaaaaccataatcagatcaaacaattgaccagtaaacgataattacatcaacaactaatcccttatcagtaaagtttaatatcaggacatatagagtgttttaatctttttgagttgttcttcaaagtgtttattctgttgaatgtagttccagaagtttttgaacttgaggagttggaagaggagatggacaacgccccaaggatgcggtttcaccagtaaacgttctagaatacaggtgataattagttcttgaacgttttctgccctctcgaacaggttcttgaagattgaaatgaacctgatggtgacgaggtttgggtacctggcatggagaagcattgaacccaccagtaacttggactttgattggactatcaatttctccaacaataaataacaattgatcacccgcattgatataacactgttagggttcccatctgatccaggcgttgtattagcattggtaaggccaattttactaatcagaagtggtaatgtgtatcccaaatacagcgtgtagtatatgagtatcccttcggcctgcaactccttcaatatcatgggcactagtctatcggaaggttcagctataaatgtatctgttaacccctttagcgtaggtttctgaattatgtactggatgtggttgacgaatgagagcggtgatgtttctgaaatctcagtggcagttgcagggtttgaacacttgacattcttaggagtgctgaaagtgaaaatgttcctaaacctcactgacgttgttacttcacagaacgacaggtagtagccacaaatgaactctgggcatatctgtaacaaatacagcagaatgttaagtatgttgtccaagagagtgtcaattccagtttccttcccgtctttctgagctgttctctgtgaggttgcagacgtgtaataaatcagtgtgtacttaataagttgtgataatgtgtaccactcaactggtgactgaattaatgactgtatcaattgcttgcttgttgcaagttggacccagaagggtgcaaaactcgccatctcagtcgggttacagtagaggagaaagtgcgaaattgacacatgggctgaaaaggtgtaatttgtattaaaaataaaattctgaataaccttgaagaacactgggaagcagtaattcttatacagcacagacaacagtatgtgcaacaccttctgaagtatgaagacgtcactctgaataaagccattcactaacttacaaaacactggcacatactccaaattgggactaccgtatgttactcttggaattccatcgaacttcatcagtcttttatgatccattttttccactctttcaactctttccacagagtcatagtgctgtgattggtatgaaatgtatagtgtcaaaagaagtgctgatgttataaagtggtctattgggttctcgttgaagtttatgaagaacaagtccacatcagaatccgactcacagttcaagaactccataaacatattaatatgcttcttactcacttccgtttgtactacacatctattccttatgtacactctgttcatgaatagtaatctcaaacttatcaacctgtccgtctgtggccctgtattattggtacccattgtgctggtattactcatattactgatactgccagtgtttggtattggctggttgaacagtttggacaggatgatgttaagtttagttggttccccaaccgagtgtatgagtgtgttcttatcgaatttgcttaggaacttgagcgataatggtaattccttgagagtgatataattcgagtccacaatcagtcggtataccattttagttacaaattcgaggtctcctgagttacataggtaaatgtccagcgctggtattttaatcagtttgaacctcaggaacagtaccaacttgttaaaggtgaggttcggcagcagtgcagttgtgatgttgagcaagtttgcgttatccaagcagagcatttcaagcaacgtcaactcaacttcgttaaccaacgaaggaattgaaacagctttcgagtccaccaaattcttcactaccctgttcaaaatcatctcgtaacattctgtaacattagtcgccttcacgactatgtagtggatactccacagtagtgtgaatatttgatgatttttaggcaggaaactcagcaacagtaatgatgatgactcgcatttgtataaaaatttacaattcgccattggcacaattggtgggtacataagcaaatacttcgctgactccttaagccgttgttcaaattcttcaaacttgcatattaccaaatttgttggtatgctttcaattggcggtactatgaagaaatctgggaatcttaaacctggtctcttttccgttctttcaactcttgctatagtcgatggcaccaatgtcaagtatttcttgtacaaaagtgataaatcatccaggttcctcaaatttgctgagtttaagtaataccctcctgaacttgtgttgcttgtatgcaatgtgctcagaaactggttgtacagaatgcttgaaatactacttgaactcgttgttgagctatttgcccaacttgaaatcatctcttccaatgatcttcccatcaactccaaagttagctgctccaccaatgcacataccaatgccaaattatctcttgccagtatctgtgatatatactccaaccatatacagtcaaatattggacaactttcacccatatttacattgccggcattgccacttgtaacctgggtgtaatggttcagaagtgactgataaatttcataggacagaattgagagtaaaacttccttacagagtacgttcactaggcttgtgctcagtccagttgtcattgaggtcaaacaccttttcaatgtgtctattgatgtatccgttgagaaatcaatcttggacaaaactccacatgttgacacacaaattggcactatcttctcaattataaatatgctttctcgataacaactttctatcgcgtttaatattagtttatacaaatccatactcattaccatgtttattacaccagaatctttctgactcatttgtaaattctcctttgttcctaaaactgagtttccgttaactgcaaccgcattcgtactgttaaatccaccattcgtgttgttgactgcaactccgttgttgctattaagcgatgctgtattatttattgatagatttgtagtcgttatcagtttcgagttaatgatgattttcctcttcaacaacaccttgatatcattgtgtattgggggtatgttgagttttgtctcatttgagtttgaccagatgttggaactgaatctgcaactctgatcaaactcacccagcactctgtgcttcaaaaggtcctttatgtgtgaccctgtgcttgcgtttcctccgagtatgttagccttcatcacgctgttcaaatctgcaggtgagtgaaccactgacggacttgcacctgttggtaagttatacatgcttgctgatttagtttgtccaccaggcagtgaaaacaggttagaactcgactgtgatgtgtggattggacttgattgttgctgatttttgggcgccataagtagcataatcaagttacttatttccaacaccagaatctgcttcaaattcttgacattcttaatctcgttaagcagtgagagaacgcaaaacgtccatgggtttggaagcttgaaaatcttactcttcaccacatacgtcattaacctgcacacaaacggtactgcaattgagagcatccccttttcgtacgaaaatgacaacagttgcttcaagttcaagtgctttgtcagcagcggcttgtttctggctattgtgaagtggcctaagagggatgcgcaaaccagtaagatcttcttatacaccaacagtgctcgacatgatctcaaatactttaggaacaggttaactgagaacgataggaaccgtacaaagtagtcacacatcttcggccccagagtctgcagcagggtcgtgatctctggaaaactactctcacctttaatcacagcgtgtctcagtaccaaaaagaatagccagtcaaggtttcccatgttaatcagagattctactgttgctacaaactgtggacctgagaatgtgaaagcgttaaccgagtcagttgtgttctctggtacgtcaatctgcaacttcagagtattgaagaagtcatcaattccaacattcaaaatcgtcatcaaacactgttcgtggtagaatagtgggtggatctttggtgggttatagtccgtgttagcacagatgcctgtcaaaacttcataccccactgacggtactggtcctgttggtgttgggatcgaagaaactggcatgtgcgatggagtcgctcctaatgtcacggttccaccaactgacacaggtgctgatggtacatctggctcctttattatcactactcctcctttatctcttatgcacttatccgagtcttcaacactaacctccacagcatccacgccgtctagtcccatctggtcaacgacatcgttggctatgttatcatccatgttagtttcaacttctgatactgaatctgatgataaaatattcttgtaggtcttcagaaggtttgggtagaacttggcaaccttcgggtctgataggaactccctcgtaaagtgcgggtaactgaacagattcttggtgttgttaaaggtcagaaatgagaactcaattaggaaaatcgtgtctgccctcaggcactccagcagagtcatgaaaatcatgtaaatcgagtcaatgtggtcactgttaatgtgcaggctgatcaggcctgacaagaaactcgacagcagcttcaggttcttaatcaaaagttcttcttccgcagacggttttgccatgtgtagacaaaagttctcaggcacatttaatacaaacagttgctggagcttgttcacaaactttctcaaaattaagtttagaatatgttggggcctgggtccatcctcagaattcagcaacttcaccgcgtttagaacgtttttcgccatttttcctgagaaaatgagtgtaaccacatgtgatgttgtcagctcactgtcctcgttaaggagtaaatatccgtaaatatccttgtttggtccaagtgcaaactgagtcttatccatgaagtcaagtttattcaggcctggaactgatagatcaggttctttgtcttcatcatcaagggcgtgatcctccagagtttgatcttcatgatcttccaactgcaatcctcgcttaattcgatcgtccattcctctgtaaagtggtagcaacaatatattgtaactgctcaaagacttcaggtgctggttatacatgaaaaacaactggagtaaaacctcgtttgggcccgtcaaatggtgcaatatataaaacatctccgctattatatttgttgataactgaaatcttaccacactaacctcttcattactgtgctcgccgtctctgttacttagttccccaccatgaacattactgagttcacggtgatcttccgtatctgacagttgcgatagtatgctagaatctgaatccagtaagtttctgtttagatcagtttctagttgcaatttccatgccaggtaatcaatcattgcgtctgagagtgagattttggcaaatttgtcagaatctccgttgattagtgtgtcaattgagtgcaccagcatagtcataaagccccagtcaaagtgttgtctgcaaaagcagacgatttccagaagccctcgactgaacctgaccctgttatgtttaaaaaactcaagtaaagttgactggaacatctgaactgagtactttattaagtcggcgtcgtattcgcaggctctcaacaactccaataaaactatgaagaaacagtctgaatctgtgtgtattgcgatattgagtatgaagtcaaacagtgactcacatcttttgtccttaaaatcgtccttaaactgtttgacttcagccaaaagtactgatttgggaactagtgtgcaaagggtttgttgaaatacgaaccaaaagtcctggttcattgtcacaatctttagtgaaattgggttatagttatttcttccgaaattcatgtagtctgaccacacgagggccagtttaaagattagggctcttgagaatattgatgggttttttgcctcttttaacaggctcaggaataggggatagaacctgtcagaatgatctgagctacgcatcgagtgaaatagtgcaaacaggaggtccgtttccaggatccagtaaacctcaatgaggtcctcgtcctgtgctgctggaaataaattgaaaaatagatcagatttgagaatgttatcttcactgtagtcgtagcctagatcatcttcatgtttgtattcatcgctctcgtgatccgattgcgaatcgccttcgggtgaagttttatcattaaaactcgcgttgaacgggttcttcagattaaagccgaaggtcgtcgagaaattcagtgaaaagtgccaaaagtctttgaagtcctgggaaaccaactcgttatacatgttttctaaaaatgttaaaattaaatcagcctggaaaagtgggtttgtaaatcgttgcgtcagtatcgatacagttaaacttctgtaacttttacttccgctcacgtccttcgagtgtataaacttgcatattttaacaagattttccaaaaacttaacactattaacaaagtctccgcaatagtatacaatttgctcgcagattttgccaaagtactctttatttaaaaattccttcaaattacggttatccagtttcaatcctgaaatgtacgagtaaacttcgttttgttcaaaattactattaaaattatatgtgtagggagatgagggcgacatcattgagttataaatctggctgctcagtaaatatcctaaattcactcgagactcatcttgcgagaccctgttacttacaaatttagagttaaaagacactgagctcttcaaaattacgtacaccaaccctaacgggtttcggagtttatccaccgtaacatccattccaagaacaaaaacaagctcaaaaagtctgttttcacaggacaaaatgagtgaattgttactggtatggagaattatattctgcagaagctctataaaatactcatcgtcaatatatgaaagtagcgttgacacgaaacagtctgcgagttcaacgtgggtgagatcatcttcgggtgtacaagttgcgatttctgaaaacagggcgtcaattttagttacagtctcagagccgaacaggtgcgagtccttaagcagcaaaagtagctcgtacaggtcgtctgagtttttgggtgaaagaagctttttgagcctgtctctcatttgggtgtacttacccaaacacgattcagaggaaaagggtgctgactgaggcagaccagccttttccgaaggagaatcaaatttactcatgataatgtacaataatagactttgcgatattaaatattaaaataaccacgtatattcattgtaatggtggaaattctaattggtgagttttaaagtgttctgtttaagatttgaaaagttcctaaagcctaagccgtgtttaaattttcactaatttttaaatctttatcttccatttggatcaattgtgattttagaaaagagcttactttttgaataacctacatatgttataggctagccttttagtaacttttgagagatgaagaaaaatcaatgtacaatgggaatacgtgcaacacaaggagcccgacgataaagtttgaatcaaaggattattattcctaatatttacacctaatcttttcttttcaatttatgaatttcagttgatcatcttaaatttcggtttattccatctctatattccttctttacccaccaaatttccaatattcatttattcttattctttcacttgatttgttacacagtgttctcaattttaatttcctaataaataaaagttttaatagttgtttgatctaagtaaaattaaatttttattccactttttgcggattttacttatatgtgatcttccatactgcctgaccagattattttaaaatcctcaaatttcttttgacccattgctacagatttaaataactataaaataattataagattcttagtttaattaattctatgtgtaaatttattggtttcattaaatccaggtcagaatttttattaataattttcccaaactgttatattaataattcttaatatttattgatatttatttgtggatttatttatttaaattcttttaattttgccttgtactggggctttttcagccaaatgagattccgccctaaaaaattacatttactttatttgtactaatgaacaagaataaaagttttttaattaaacctgaggccaattctcctccaattgatacctccaattggccccttttactgaaggttagattccgttaacttacttactactaaaatatataattagttggccaataacagtcttccactcttggaatttttagtaaaattttgcttcataatttttaataatgattacagaactatgataagctgaacgtgagaacgggacattatactccgatgccgcatggctcctctccgctatgcagggatatgaaaaattatatgaaatatggctacattaaccttgataagccagcaaacccctcatctcacgaggtggtggcatggattaagagaatccttagatgcgagaagactggccatagcggaactctagaccctaaagtcactggagttttgctcgtctgccttaatagatctacaagacttgttaaatctcaacaaactcatggtattaaaccctaacttagctttatttcaccatacttagtcattatggttatatatgttcatagggaaggaatacgtagccgttgtaaagttccattcctcaccagaatctaaagcaaaagttgaaaaggtaacttatctcaaatttctcagtatttagcagatcaaaagcaacgaaatttatatttttttaggtattggctgaattaactggcgccttgtttcagcgtcctccgttgatttcagcagttaaaaggcaactgagagtgagaacaatatacgcttcaaagcttctggactataacgagcaggaggatctggcacttttttgggtcaaatgtgaagcaggaacctacgtcagaactctttgcatccacatgggccttttgctgggaacaggagcgcatatgcaagaacttaggaggattaagtcgggaaatatttctgaatatgataacatggtcacaatgcatgatgtgctcgactcacagtacctttacgacacgacaggagatgagtcttacctgcgctacgttgtaactccactggagcaactgttaacgggccataagagagtagtcgtaaaggactcatgcgtaaacgcaatttgctacggtgcaaagttgatgattccaggagttttgaggtttgaaacgaacatagaacttcacgacgagatagtcatgatcaccacaaagggcgaggccatagctctgggaatagctcaaatgaccagtgcagttatagccacagttgaccatggaattgtagcagtgattaaaagggttatcatggatagagatacctatccacttcgttggggttacggtaacagaagcgcagagaagaaaagattaataagtctggggttactggataaggatggcaaggtgaacgaaaacactccacaaagctggactaacaacgaagggtacctgcccaagttaacgggaactccaactaataaccacgaaaacgaaactgaaatgaacgatgtagatgtggagccaaaggttaaaaaggttaaagtctaaaattgctattttatcatgtactttatttgtacttttaaaagttaattcctaatgtagtttaattttcatcatttatgcaattagtgtggacttgaattatatgaaattaatttacaatgagggtgaagtaggtttctctaacttcagtcttctccttttagtcctagtgggagtaacactactgtttcctctcttagacttagtagcactatcatcactcttctttctggatttaacaggagtatcatcactttttttacgaggtttacgcggtgtagcactactggttcttctagatttgggttgtgtctcaccggtttttctcctagatttggcagtaccgtcactctttcccctaggtttaataggtgtttcatcagtgtttagtgttgagttaataggtgtgtcgtaaccgtttattatagagttgagttgtgtgtaatctccgtttgttacagagttgggttgagtttcgtagccgtttcttgtatattcgttttgtgtatcatagccgtttattatagagttgagctgtgtataatctccgtttattctatagtttagttgggtgtaatcagtcttacgtttatatttaagaggtttgttgtcgccccgtctcctgtacttaagaggtgtatcgcttctgtttatgacgggtttagtggaagagtcatcactctttctccgaggtttacgtggtgtggcacgactgtttcttttagatttgggtttactaggagcatcaccttcattttcgggatccttcttggttttcttccttgactttgtagtctcagatgattttggcggtttctctttaggacttttctccttgggatcctttttaggcctgggagcactgggacgttttttcttattgatttcgtttttcttggtgggaaagtaaatggtagtcatgaattttaagttttccctataattaatgttaggctggatgtaaaatataggataagtaaggccctgaagcttaacgatacgttccttgagtaacttgtgaatcatcatcttctttaacagaatcatggaagagtgagagtcgaaaccattctttagaaggtatccattgagtaagaatttagacttggtttcagaatgagtgttattcatgagaagtttatgtaaagttattaaagtaagatgactcatgggtgtgatattcttgcaaatgtattcggcatgactgacgcagttcttaactgtgtagcctctcgcttcagaattagagtttgtaggagaatcattagaattataatagagagctttacagttatcacagggtaataagcacttactagtaaatttttgaccaaagtaacccaaaagcataaatcttctgcataaaattttctcctcacaatagtccatcatcacgagaattttgtcaattttgttgtcaaattcgggggttgtggtgggagtaaacttgcttggctggagaagaagtggactgttgagtaaaaaatgtctttgaatatcatgataattgtacatgagaatgcacgtacttttcttctggtctctacctgccctaccagactcctgaaaataattctcaattgatttagaaactgagaaatgtacaacaaaacggacatctttcttatcaattcccataccaaaagcgatggtggccacaatcacctttatcctatcattgatccagtcgttgtacacattcgttctgacaatggtgcttagttgagcatggtagtggaagcaggtgataactctggataattcagcactcactctctcagcctcaccacaactgaggcagtaaactattccacaactatcttcaaattgctgaattaacttaacaagttggttaattgcaactttaaagtgtttagacttttcaaccaccacatattccaggttcttcctgttaaagtcagacttgaaaatcacaacatccttcaacattaactttgctataacatccttagtaacatattcagtagcagtggcagttagagataagataggaacatctggaaagtgcttcctaatcattccaagttgtccataatgtggacgaaagtcatttccccattgggacacacagtgtacttcatcaattacgaatctggaaatcttatttctactgtgcattgtgagaagattttctaaaagtatcttagaacccaccaaagactcaggagtgatgaaaagaatgctaatgtcatcagtgtttgtgttatttactgccataaaagagtcaacgtcgttggggaccttaggtcctattttagtcaagtcgttaaatattgaaagtttctcggaaagttttaaatcgccaaatatagctctgcagtttatgttcagtttgttaagtctcttcatttgatccccaatcaaggataacaagggcattacaactatagtagtacttcccctacctgttatagtgtcgtatactgcaggaagctggaaacaaagagacttacctcctccagttggaataataacaaaggtgtcaatgttactcaagatacagtttatggctggaagttgatttggcctaaaggatttattcttaaacaccttctcgtttatgtctctaactagagtcgaccattcaaattcttcttcccactcagtgcctgtgtatacgagatttctcaagtccatatcagatacattgtaggtagtttggtttgctacgttaaagaaggagtaattgttttcattgatgtcgttgttgtattgggtattctcgtagttatcattggaataggttgtatcctttttgtttgaagagcctattttaccttccacgaagcctctttcaacctgaattttaggttcataggttccaggatcctgaaagtattctaaatttaaggcatttctccgggtgaagggaactatggcaggctctggaaggctagcagatttcctagcaaactctaagaactcgttaagtaagattgtataaggagtttcataggtgttaatacatttagaatggtcggattcttcaggcttcccaaagtctaccctctttgaaagtttctcgaaacattcattgtaattgtttttcacagtagtacttagagaaatgggttccagtttataatccatttaaaattttaataatctttctcatttgaaattgcaaaattttatacaaaggttagaatccgtgtttggctaaatgagaagaaataaaccaagaatccagacatttgaagtcatttttatttaaatttactaaaaaattatattacaggataataaaaattgcgatatttagaaatttaaaaaaataaccaaagtgtgttaatgactcttataaaaacgtttaatcatagaattttctaccacattaaaaaaattcctaattaaaacagtaataaaatttaaaaaattaaaaattaaactgaatgtgtataaaaataatgtctttaaaccccttttagcaccagacgttgtctagaataaaacatcgtcactaataatatacagaagtcacattgttacaccctttgataatatattttcaattactcttgacttgtaactgttgtctgggaatcctcctttttcaattcctccttctaagtttgttttgtgttctatgccattccattctacgctgccgtagttatcttccattgagtcttccaccctaaaagtttgaccatccaaaaaagccaatattaacatcctcagaataaacaaataatccgttgtaattggtaaaaaagcctttttaaacactcctttgtatggccttccaggattaggatgccaccttagctgagttccgctcttcattttatactttatctctattgttgtcatgaatgtcccgttcgaaagtagtttcaagtcctttttaacattccaggacatcttcccgggaggggaaggtccctttccagtcaatgatatgcaattacaaagtgggcaaactacatttggtttcttagttttaatggcataatccaaaaaacaactgctgtgatatatgtgtaggcatccttttaaagagattaaatcacaaattaaatcctcaaggcagattggacatgctttatcttctacgggctcaaaaactgggataaacgtctttgaaacagtctcttcattcaaattagttattctgtatccgtatttaacttggcctttatgccaccaacggcttttgttggggaaaagacttatgtgcctggatgttactcttgtaacataaaaggcttcttgatccagaatcttgtcatcatttagaaaattaccgctcaaaacattctgatcactcagtaaagataaaactaattttctgtttaaagtgtgattttcttttaatcttttctcatcatccacaacatcacaaatggcgtaaatcgctgaacctttgtgggtattaaaagagtgtttaccattcatagaattattttcatatgtttctgactctttattttcctcgaattccttttttgtttcgatttcctcaactctaacagggcagtttgagtcagattcatgtgcagaataaaagctcatattatcgaaaaaatacatatcacataaacaaatttcccctttaaatttgcgatttaaattagactgatatttaaattaaaattttaaaggagtttgtcaatagatattcacatactaccctaatttcccgaagattcttccactaaaacttatttttaaactatgatttaagattaaaacaaaaattagtatgatttaatcatatttttcacaaaattggttccagaggagctctgttttccgagataatggaaaatacgtatgaccaaagtttaaagtttaattaagtcaccttattgattggaataagccaagatttattgaaatttttgtttttttcgttattttatattatttaaggaggttttcaggaaactttgcccagatctgcataatgttgcatatgcttaaaacgttatctattcccctcttgccaataacactgtctttgattcctaaataagcatttttttgtttatttttaatattcgtattattatgtaatctttcacggaaatgtgttttgatttgtttaaaatgtgtaggatgtgtaaaccatactaaatatttaatgttttaggggaatatttttcctatttcaaactaggatttaatagattttataaagaatttttatatctcagaattttatgtctgaaccttaacaaattagccagatacgggtttcaaaagattattcctattatttattcaatatataatcggccttatataagattctatgctaaatataaattttcattcaaacttgaaactaattgaaaatataatttgaaattttttaattatttaaacctttacaaattaagtaattataaagaacttggaatgactagtactttgtgaatttattgaaacaaaaattattgaaacattaagattatttatttgtagtcatttgtgactattatgaacccacaatccttaaaatataaaataatatttgtgatcattatgatatagtgcatccttgagttgtattctttattttatttcatatatctgagtttaaatttattatttttgaatattttaactttaatactttaaaatcgcataaatgataggctatagttactaagatttattttaaaatcatgtcagagtatacgaggtttgttattttcctaaaattcccttattcttttacctaatcaattatatcttaattgtttactttattttttattttatttttgatattttttgttctaggaagagagcaactttgctcgtaaagccgcaatgggatgccgttgccaaacatgaatccaaaggttcatttgccctggttgagcatacaacatctagcaataacaataataccgtaagttatattgtttttaatttttcgtaatttaactgttttacccatatttaaacctgatagtgtcgattaacttaatgttcagactttatctttacaatatgaccccgaagggagacctatgtatgagcaagtgataacccagaatgttagaaaggggaagattacatacactaagccttccgaccagaaggaaaagagttttaccagtgatcagttggttaggccatctgatgaaacagttaaggagaatttagaaaagactaaagaagcccttcaaatggctcttagttctcggacagttcaaacagttacaaaaagtgaatctgaagtcttcagatacactccaaaccaaaaaagcgatgtaaccatctatatactagctatatatttagataataaatagataaacatattatcatatgaagttgttccttaaatttgcctaataatatattccttaggtcggccagagattaattaaaatgacgactaaagtaattgatcctttggaaccctcgaatattcgtcacaagaagatgcctgctaacccaccgagtcccccacctccagtactccattctccaccaagaaaacttaccaaggaggatcagatgaactggaagatcccgccctgtgtcagtaactggaagaaccagaaaggatacacactcccaatagataaaagagtccaggcggatggcaggagacttagggaagttgtaattaatgataagtttgcctcactttcagaatctctcttcattgctgaaagaacggccagagaagaagtcaggatgaggaatgagataattagggaggagaagctgaaggaggctaagaaaagggaggaggagctccgtgaactggctgccaaggctagagaggaacgacaccaactatactccaagtcacactctaaagacgattctaaggatcgtgaccgtcgcaggaggcataaggatagagacagtgacgaggagagggaggagcttttaagaattgaagctgagaggaggagggaacttgagcgtgaatggcgcattgagaagaacattaagaaacggagaactggggagagagacatcagtgaaaaaattgctcttggtcaggctaaacctaccaagatcacagatttatacgacaccagacttttacaaggagatgctggaatctcatccgtacgtcattacttaatttacttaatccaccatgccaaatgattgacacgatttaatttatttttagggatttgatggaggggatgatgaaggttataacatctacgataagcctttgtttgctgacaggagtactgctaatatttatcaacattctaaggaacgattccagaaatccaccgggtaccattcacatctgactcttttagttaacacataaatattagtactacatcttacacttagttagtcaaacataaatattactaacacacgcttttactttatattatattaaaaatgtgataaattattttttagtgatgtgaatgtggcgagttttgcgaatgctgatcgtggagtgcagaggaatacgccggtggagtttgtgaaggactcggacccatttggctttgaaaagttacttgagaaagtcaagaagacttaatgtattaatgtttacaatatgttacactagtttattttaactgtttgatgaatttgactgggaccttgatgtcacaatactcctgagactttttccgtttgtacgagaggtatttcgagtaaacgtagagagaggctgcggataagaacccaattagaaacgtgtacatgaatccaagtttcatgaaaagcttcgtaatgcatctagccagcagtgagaagagtttactcaggagttgcttcaacacctttaaaaaggccagcattaccttcttgagaacctttttcaaaaataagaaaaatttcttaacatttctctttgtggtctccatgccaactagaaatgagtagctaataaatcctaagattgcaaaaaataacctatcaaagcctttttgagccagcgagaatgataaagtagataaacccagaagtataatgctacacaccagcacaatagccttgcagtgcgtattcaggaacatcttcttaaactgaatcatgtgagtgtccatatacctgtcaactatgccatcaacaaacttgaagtgaatattagttctgttcattcttattagtttatccctaagcgactcaaagttgaagtcagactctgaccctggctttattccaatactggtcctgtaagaatcacttgaataccttttgttaaatccttgtttttctggtgtaggcccttttctaaccataattttcctcgaatctgggttataaagcacttttaatcccagagactcaattggacaccttagtgataattggtttgggtccaggttcaactttgcatacacaaactttggagtcattttgtaacttacatatctcttggcgttatatctaaagtagttgtagaactttgatttctttacttgagtcattaaatatctgtcaatctccagaaaatcagactccagtgcctcagatgctattctgacattttcagccagcatctccttcaacttatcgttcaacttctgctcaagcttggtctgccgcttatcgagatccatgtattctgtgcagtagactctgaaaaactcctctctagagacgtgtttcacgtattcgtggtacatgtggatgagttcaggacttgttggcagtggtgcaaatctattcaggaaaacagggtaattatccagatagtgagagtgcatgttgtccagcttctgaagacacctgttatgataatttgttttaaaaacttccaattcctgagttagtgccatgtttaacttgtttttaacctcggaaaccaaaaactcaagagcgtggaactcacccaagtgagtcatcaggatgttttgggcttctttaaccagagttgtactcctagccaagggctcctctattggtaactcatagttttcttcaacttggctaaagttaaacttaaaatggttcagtgccttgttgtacactgagctgaaatgatgatctatcatcttctggttagtgtcaagcaggcctgcaatcttatcatctaacctggtcaagtaatctgaaaacaccgactcacacacactgtcataaaataatgaatgtgccttcttactttctatcaggttatcatatgtttgaggctccgaatcgtcatactcagcctcctctgaatccaccagtagtatgaatcttctcttgaactcgtctttgaaaaagtgtaaaaatttcaacttgcttggtagcgctggcaatctcacttgttccactctctcgtcaagtactccaaatactttttctgacactcttccgcagtgttcctttattgtttcactaagcttttctgacgcttcttctgagaaactgtcaaactcactcgccaatgctgaccatgagtctttaaagtctgttgatagcccttcattctcaaaggtctttaacatcagctctaggaactcgtttctcaacttgaagctgtacttttcaaacaaactcatactcggtatcgggcgtttccttaccagttctgatgcctttctaccaccatccacaacttctttcacagatttattcacaacatgatccacagaatttttcacaacatgatccacagaatttttcacaacttctttcacaggttgatccaaattttccaggtcaatgtgatattttttaccggtaacaaacttcatgaggatatccttgtagttgtgggataaatcattctggatcatgagtagtctggaaagtctaagcaccttcacaagcctatcaaatgcgtcgttttcggtaatcttcccaaaatcacctgtggtcaaatcagttgcgagtttgtaaaacttgttcattgaaagtattttcatactgaagttaacaatctcagccaagtcacttcctgacatgtgacaggttgatgttgactcatctactgaacagtgctttaggagtgggtttcttaacgctcgcaaaaacagctcaaacttaaaatgccccagtctctcaaaatacttgacaacaccatttggttcattatttttcaagccgttattatcattggtatggaaaagagtgttgaaaaggtgtgatgaagtgcttggaagtgttgaaacgttgacggagttgaacatcatgtggaaaatgtatccgaacctgctgaagttcacttcgatttgttccagtgaatctgtggtacaaacattcttatcagttctactaggttgttcatctttgggatgtgaggaatcctttttgactggtaacttatctctactgtctttatcaattttaggcttaattttccttacaaaatctgctctgaaatcatagtttccgatgttaagtttctggtttttgtaaaagaagaactcgtgtagtggcaagtctcttctgggtgatcttagcaagtttaccaaattactgaaagcctgctcttgtgtgaatttaaactcgttaaccaaaaatgtaagattcttgttctcgaacattttaaaaaagtactgaaatatttcctcattttcatgctcaaagccttccaaaccagtgtatattttatacaaatttgatatctttgactggagtgagcatttgatcagatcctccatcagtaacaaatctgaggagtttagggtcctgggtgacagatacacaatctctgaacatattagcgaaactattgaaaaaattgcctcatcgtacctaaatatattcttgtgactgttaaagccctcaacgtcaaatagtaatacatttacagtatcagctaaagcttcgtcgtcatagggatctgacttgattcttgataatttcgagtgttggtaaacagactctctgggtttcttactcttaagtgaacactcatcaactttctcagcctcatggtagttttggatcctctcctgtaaacgggttttgctaatttttagtggtttagagtacacccaaattccaaaagtttcaggttccggtgttttagacaccttaaacgtgctggaacccgtttctgagttaaagctcttttgaaagtttaaattgcttaaattatccaagtttggtttacaggattctaaatccttaactaacacgcttttacacaaaacattgtcgtttaaaaggtttaacaggaaactcttgccggaattaactgggcccacaactgccactgggtaaattggttttgggactgtctttaaaaaatttaaaacctcaggatcaaccaggagttcagtgtgatcgtcgttggggtaaacgagttggagcggttcccctaactcgaggtcatctgaaaaacaaagtatatcttcaaattcatattgtttattgtgtttaatttttggtgtgtagtttgcatttgtcttgtttaatacattggaatcaacggtctgtgtgtgtagtgttgacttttgcgataaaacctctagatttagctgtgaatttatatccagggaatcattttcaactttattacattttacaagattggaagatgaaagaaatccgccgataacaggatatgctacattggtgttgagacttttcaggagtagaattgcaagaagaaccagtgatttaattgttaactgcattatactttagtctaaaaaatacataggtgtgtttgatctcatcggttctcatacgggggttaatatagtacaaaacatcaaatgagtgaggcgtcggttcacaaacgggcaggttcgtaaacatttgcacctaattttatcaaatcaaaaattacaatcaaaaagaacccatacttgtgaaagaaactcgaaattttgattattttacgaaatatgaccagaattaatagatgttgtgtgttttctgtcatattaagagttgaattgagtaaattttttaccacaaattatttgtcattttagttaatttcagtttatttatcaagtgtagatttaatattttacgttatttaaattttcatgtgtaattttttgattaagcgtgtattaaaatgttgaaaaattaaaaattttctttatgtgctcctataaaaacctctgaaatccactcgtttctggatgctggaatgtaacaatcctggaaaatactgacttttctcactctctcgcctcttctaacctcaaattccggcttctttttaccggcttcctacaaaaaattttgatctgaatattgtttaaatatttttactacaaattttcctcaacaatttgagaataatagcttattttactttagatggaattattgagttttatatctgaatattctatctagttaatttgtgttttgttagttatctcaattgttcgcacaaccaagtaaataagtaaatgaggtactgattttgagtttctccttcttttaacttcaggagtaaatgttatttcaggcttggaatgtattcttgagtaacagttgaatgatcttgaatcatccttgttgaaataatttggtgaagttatgtttctgttagttctggaactccttaaattgaagccttgggaaggtggaacctgggcttgaactggtttcttttgaggagttgaaactttgtcctttggcttttcaatttggttgtttggtttttcaggaagagtttgttctaggtcaggttctttgttttccacttttgtaattttattctcagccacttccggctcattgccatttgtatttatagaattgatctcgtttaacgaatctacttctgtacttgcatttgaaattgagtctattttacggtaatctttgctagtttgactatttgaaatatttttgccagtctcgtcggagacgtaatcggtaaacacaatatcagaggtatcacaagaagaatttaaagcatcagtggtgtccaacagttttttagtgtccaaataaaactctgctttgtaatagccgtcaattatttcgataatattcgagcaatcaaatctaaactccgatccacagtaatttgctatccaagtcaacatgcaacctaaaattgatagatttaaattggaaaaaaaataaaataaaagtaaaagtaaggtctggaagaaattttttggatagtttggatgatctggagagataccatttatctcgtaagagatctcattctctagtctcgatcctactggcttaagtgaatctgccacgtatctcatttgattggattccaaaagagaagggtgatccagcgccatcttaataaattcagtctaaacatgagtgaagatgaatattattgcaagaaagcgaagatctacaacaaaaagaacaaaagaatgtttaaaagtataaaaaataagagctgcattgttaaaaagtaagaattgaagattataagaaagtacggtaaaaaattatcaaaatataggattttgagatgtcacaacaaacctagtggagattgaagtgtatggatgcaaaaagtttgaaaattcctaaaaatagatataaacatgcttaactatgagaaaatgatggataacattcgattaaaaaattccttaatggataataaatgcgttttggagaaatcgcggattaggtgggagacggggtccgggattcaggagcaattaggattgaaaatagtagaattggtgagtaaatataaagtaaaagaagttgaaagtgcaataaagggaaattaccttgtttaaaaatttgaccagggccaaaagaacataaaaggaaagtttatgttaaattttacgtacatgatgaaacttaaagctttgaaaaattaagtccaatttatatacgtaaatggcataaatatccttttagtttaaggataagtggaataaaagtttaattagattaaaatttgagtttataattttattgtcgtgtgaaaaagtttttgaacagattcatttcacactacaaaagaaacatgtcgtaaatgctcttgtttaaatgaggaaaatggataaatttatatatttgatgattaatttgagggttcagggcctctttgatgtgtttcgtcaccgtttgacaaattatgttccaacacaacattatttattagacgagcttaattcaatagattttaactttatataatataatttatttattcatgtatttatatacatttaattcctctgggttttcatatatccctgagaattgatctttaaaccattggagaaggtcagaccatttacctccctttaatgaattctagtacattaactaactcggaaaaggctaatttatcataaatactaactaaaagtagttattcagaactaatatatctctaattctctcctccaacatataataagaatatttctcattctaactaataaaataagtattcttccatttttttaagtttgtagaaagtttataattttccaagttacttttttaaaatctaagaatatgtttagagtcagtagaattagtagtgatcttagtggtgtaaatatttcttcataacaatatggatcaagaatttttattatgtaaaattatttataatttattctaatgaatgaatttttcagatttgataaaattttttaaaatatttttaatataatttccgatttttaaacttgtattataatgtttacaatttatgtgtataataatttttaattaatcttgatttactattccttttaaatggatgataagaacaaagggtccgaaactagcacagaagctaagaaagatgatagaacattttactcagatatttgggatttcctatcctcaagcacatctcaaatcacagatttattccagtttggagagaaagatgagacttactcactaaccgaagattacgaatcttctaaaaagttatttgacaattacgtcaagagaattaaagataatttgagctccggtgatacttctggatcagactctaaaataaacggaaatgataaaaaacgtactggaaaatgtgttaatactaagttatatgacatcctggaggtgtcaccaaatgccacaaatactcaaattaaatcgagttatcgtaaacttgcactaaagtatcatccggataaaaacaccagcccggatgccaagaagaaatttcaagaaataggtacaaaataataataaatcattaattttaggtgaggcctatcgtatccttgttgatgacgtatcaagagagaagtatgataataccgggtctacagatatgtttgacatgtctgacatggatatagaaatcgatgtcccgctattcttcatcatgctatttggctgcgatttacttgatgaatacgttggtccaatgaagtttgagcatatttttaaatacagtaaaggtttttctaaaaagtcacccactcaaaatccgggttcaatgttgtccagtttcttccagccaccaggacaactaagtaattccacagctttagttatgcagtctgatgatatttctaattacgtaaatactctgcaaaagtacagagaggctagactagccactcttctgagggataggataacagagtgcataaatcttaacaagatcccagacactcttgtccaatttattgagtctgcatgtaatgagatgtacgtggacctattcgtgacttcaattggctgggtttatgagaattgcgccgacagttacatgagtgaggttgactcattcatgggactaggagcaacttactcaaatttgcagtcaatcggtagaaatttgaataacggatacaatattatcaagtcgggtttcaacgtcctgagtgttattaaccaaaataaaagcatgttccttaagaggatagagtctgagcaaatgaactttgaggaaaccgctgagaagaagaaaatactcttcgagagttttgaggcttgtttggactgtttcatgacttacctgatatatgatattgaaaacactgtgaaggaggcctgcttcaaggtgtgtaaggaccatgatgtggaccagaaaactaggatccagcgcgcctgctttatgagaaatctcggcattaggatgcaggaaattgccgagtctgtaagggctaaaaagggcggatccaaagctgactttaccaaacttatccaagacacgtatgtaaaaatgaaagttaaatctgacaagcaaaattaacaaattcacactaattttaacatatttaaataattcactaaataatttattaaagaatttattatatattcaaactttaaacgtttacattcatatttttgaagttaaaattgaggttagaaaggagttaaattcagttttgggaagtagttttgggaaaaagttaccagtgcctttgcctggatttttaactttttcctttaaagaatcaagatcagatatgaatttatggtctagaacatgtaaaagttctatctgatgattacctgcaacatcagggtttgggacaaaaactgcgtatttctggtggctaaagacctctagaagattaccagagcccaaatgtgagattactagatctgcgtttttgacatattcagtgaagttatctaagtattgctttactactattggtagtatggaggttttagggtaatatttccctatgccaatttggtaaatcacgtttgtatatcctaaactctttagttcttgttgaaaatcttcttcatccactctccttatcaaagaatcgaagcttgaagtgccaactgtaacaagaacagtccttgatccatcggaagattccttgggcatttaaaattaaattatgcaattatttataaactttcattaattagaattaaattttaatttttaaaaaaataataaaattttaaatattaaaatgtgtagaacaacaaaatgtagaatcacactaaataataatgtggaatcatgtgtaataatgtaatgagggttaaaaattaatttaaggttcacttatgcctgcgatccctggattttgatctagatctagatctagatctagatcttgaccttgttcgtgacctagttctagaccttcttctgtaattttcccgttctctgcgatcacttctatcattgtaacttcttcttctgtccctgtgatcactcctctcagtaaaactccttgaaccttcaccataactccttgaactttctctgaagctcgtagaaccatctccgtaactcctggagccttctctgtaactacgatcgcttttacttcttggtgaggatgttgattctgatttactagttcttctttcacccaaagattccctagaatcatttcttctgccattcaacctaaaataatattattagtattagtaatggtatgggtagagttagtagaaaaatctgggtaagaatgggtaaaaagaaacttatgtctattttcttggatgtatgctgatagtgtctttgacatatctcttaatttctgaaatccaacatgtattttcccactgtaatgctccgtcaatcgcctatcactatccgtagctacagccacattaatctcactatatagttaaatatataattatgtatatagttaattaggtagttatgtaataataaaattagtatgtaaagtacccgatagaagagctccacaaacgtcacatggtttgagtctggattgataactggcatcaccagctttttctagcatttccagcttcgttcttttgagaagttcaacctcctcaactattttgaaggactcctcaacctcaccattcctaccaagctcatccgcctacaatatttttacacacaatttacagggtgtagagactagatcatcaggtaactaagggtgattgtacgtacccgagccattcgggactgaatttgcttgtctattttcttagtttcttcaattatcattggatctaaagttttccttctgaccaaatcctcctcaacctaatttaaaatttattgtgtttgatcctacccgagcctttcccttggcgattttcttgtcacagtcgtcaatcataggctgtataatcttcaaagtctccaactcatagccataaaaatggttcttcctctcattctgatatctataaaattattatagagtttagaagttttggagttaagatgtgatcctgtgatttagggtgtgattgtgtaatttttggatatataggataattaattgatttattgtggattttacctttctctgagtttttcggagtgtaatctgctacattctcccatgtagaatttctaaaaataattacatctaaatattaaagttttatctaataatttatttggaggataaaacaatcagttattagtgttacggtgttttcaaataggtcgtgtgggcatattcctgtgagatattgtctgcaaacatcagggtctgtgaacgacttggtggaatccaggtcttccttttgctcatatttgcccattaactcagccagcgttgcccttatttgatccatttttattattagttattatgctatgattaattctggatttataaatattttcaacttatggtgatttaaaggcccgataccagagaatttgaaattaacttcttctcagaaaactaacttaatacattttacatattctaattatttaataaatttgtgttacttttggagaatttgagtcttttatcccaagcccctaagattcctacgattctcagtttttacacagtccaaaattttcaaattagttttttcaaatttaataattaaaataattatataattaattaataatgtggaatagtaagaattttgtgtatgctagggtggatgaaattactaatcataggtataatgaggatgtaaatgcgattcctttttttaattttgaaatacaagttaagaaaatctgctccatggtcatatttccaatattcctcgaagcacacgccaactgcctcaataactcatccaatctcctaaataacaattatataacataattatataacataattatataaaaaacataaatggtataagtaaaataattatatattttgttacctaatgcatctgatgactgatccttcgaatactgaggagtctgctaggatttctatgaaaggatcacctttggcccatctgtacactactgacattagtgtcggtcttagcctgtttacatactcggcctcatccaccacgattccgcaatctatcatcacatcaactatctcagttgcgatttcctaatataattattaacctaattagacttgattaccctgatcttattgtatgcctcaatgagtttaagttctgtgggtggttttccctcctttctatcatcgttgactagacaacttagtgaggcacaaatgtgttctggctccatgttctcaaagaagtttctcaagaacaattctgacaccagtaactcgtccgtggcattgatttcacatgctattctgcccttgattgttacggtgccaaattggtccacatactccaatttcctcaaaactgatttcatatgccttaactcatccttcattattatctgagtgcactcctttaactgcgtttccaactcctcagtctcctttctaacacgtgaatactcggaaaatctgatcatacatacaaatttgttaaaattacctgctagataaatccttgtagtcttctctcaaaggtaatggtgacgcatttatctcattcatcagtctatccatttctctacaagattatataactgtgtttaattagtatataactatgtgtatttagtgtgtaatcagtatataactatgtgtataactatgtagaaaagagtatgaagatacgataaaagtgtggtaagatctgggttgttaattttcatgtgttctacggggtgtagtagtgggaattgtccgagtgtttggatatgtttacttaattgttcaaacttgttaatcattgagttttggaagttctgtgactctgtatccactttctcgtgaattgttatccggacctgagacatcttctttatcgtatctattggaagagctttaacctcaaatcttccccaagtacgctctgttgatgggtacactacatctcctttcatcctctcttgatataaacaatcaaagtaatatctcttcaagttctacaaaaggatgttactggtgcgtagatggtgagtatataggttagtagggtaacttactagcccgttaactagttactatataacttaataactagagccactaagtaacaaaataactagaaaaagcattgtaaataatactttggggttgtttaattttaattttgggggtgagatgcagatggcccagccccaaatttgatcatttttaacataaactaatcttccgtaatttaaataatttaaagatttcgtatcactcatcacaatgtcgcttgatttttccgtgagtttttccagcttttccttgttatcttcaagtgatgacatgtgcagaaataacccggagtcaaattcgctcctcaaagtctccaactttatcttagattccttcaatttggaggagatttccactgacttattcttgacttggaattgcataaatgacctctcaattaagtattcaggcgtcgtgtcctcgatcctcattaaatttaataacatgttataacccaaatgaaacgtcgaatccaaattcaacggcttccccaaaaatatcttcttcacctcctcatctatcaggactacacaatttatggagtgtgagtatatagtatatagtatagtagtatacaactaggtatggtgtatacaactgtcagaataacaactactaagttaataactaagtaaattatataggtgggtaaatagtaccgtcagatttatctagcattatgatgacgacgccgatggtatcgagaccgcgtctaccggctctaccggccatttgtatgtattctccggatgagatgtacctaacttctctaccgtcccacttcttcatcttggtgaaaacgacagttttcgcaggcatgttaagtcccatactaaacgtctcagtactaaacaacaccttcaacagagattcctggaataagatttcgataatttccttaattatcggcaatagcccaccatggtgaattcctatgcctttcttaagtaacggtaacatgaagagattttgtggtaaaagccgatcctgttcacttagagtagccatggcatttttatatatctcgtcaatcagtttcttttcttcgtctgacgtcatgtcaagatgtctgacagctgtggcggaggtctcacagtcagatttactaaatgaaaatatgatacacggggttaaattcttgtcaaaacagagtttaacaatgttttcaatatccttaaatgtacttgtaattctacgcttgtctcgggaactcgtttccttatcccttgaattactctgtgatccaccactcaaacacttgttgtagttagtggatttaaaattattattctcatctaaaatcagataaatcccttcagctcctgacatgtataagtaatggtttagtggtacaggtctgtaatcagtactaatgacgttacagggaattctcttaattctggtaatccactctgagaattcaaggtaatttgggattgtagcggataggaatactagatttaccttgttaggtattaggataatagtttcctcccagactactccgcgttccaaatcacgcatgtagtggacctcgtcaaatattacacacttcatctcttggactatttcactgcctctgtataacatactcctgaggatctcagtagtcattaccatcactgaggcgttggggtttaaagtcacatcgccagtcattagtcccacgtctacaaactcatctgacaggtttctgtacttctggttactcagagccttgataggtgaagtgtatattattctgtgcccatctcttaagcccatggctatggcatattcagcgactactgttttcccagctgatgtgtgagcacaaacgagtactgactcgtctctttccagtgactctattgaccgtttctgaaactcatccagtgtgaaaggatactttttcgcaaaagtagtgatcttctttggtgtatatttgctttctacaggtgctactctgtagtgagaacagttgtacgaggagtggatcttctcaattttaacatcacttgtaagcggggaggttaagtgattaaactcataatcgtcctcatagttattaacattataatcttcctcattgttattaaagtgtgaattcgggaaattatcatttctagcctgtttcaagggatttgaacaatcttccacttcttcctctaattaatattaaattcaatagttaaatttgttaattttacattggttactaaataaatttatataataatacaacattagatatgtaaatgagtaaacattgagaaaattagtaaaagatacgttgatctccagtttcgaagacatcgaacatggaaagcggatctaccatttataaaattaagaaaaacatataatacatgactatggtacaaaaattattttattaaactgattttcccaaatttagccttacacaacgttgtcacaatatattttaaaatttttttaaattttagaaattttgttaaaccattttctgcgttagtagaactggacatggaacacctcttggtatcattttagtatccgttggcactgataccagtgtgccattcatgaacgtttcctgacttacccttaccaacaccgttgctgacactgtattctccatcacctccacactcttcaagaatttaccacctaaaaatcattacacaatgaggcattatctgtagatttctgatagactaagtgtgtgtacttactggtttctagagatggaaatatcattagtattgaaacatgtgttatcctcttatcctaaacaattatttaacacttggttaatacgttagagttcttgatatcgccttgaattttaacagtttgaagttccaattctcctcttgtctagaaaattttatgcataataattcgtacttgtgccaggagagtagctgtaattgaagcgtatggaagtggaaatgcctttaaaactcctattggagttggaatttcagagaaaattatgctctccaaaaacgcaataaacttcgcgtccgaatagcctacaaaaattttaatcaatagtgaatattaactaaataaataagggtaaaaatactttgagagagaggttgtagtagtttgtatatatttgtgaaggtgggaacatctctgtggaacaggtgtattttagagtctttagaagttaattttaaacttccaactaaatctagccaaacagtttccaaactcatttgtatattctcacacgagtaattcatcttaaataaatttgtgtttactgccacatttccccttgtattgctgtgggatggagtggattttggtgttaatttctgactagtaaataaattagtcaggagtgttctctttcgtttcgggggaaaaacgtctaaaatgtatagaatatcaggtttctccaacgtaggatcaaactcctgtaaataggcccagaaataatcttcctcatacttaatattttttactttacttttggatttagtagtaattagagagtttagaacttgtaatattatggttattattccctgataacatgagaacaagtatactgtctccattgactttagactgaagacaaactccaaagccttgaaacaactcttcaatgacataaataacttcatatacttcatcaattggtctaattcattgttatacacatataattatttatttaactagttgactatttagtttgatacaattcttatccttgagtgtggtgatgagatcaccaatacctaacttggtacacagtatcaaggttacaaaagagtgtaaaagtgagtttggaagatgataattcaaactatagtcccagcacttggcaacttgtttctgtgacttcaatttatttacagtgtgcatcagcttaaacaggcccaaaacattcttaaccgaggaaatatacttactaaagtaagtatttagatcttcagacttcttaacactaacagtacatgagttggaaaagttgtatagaattctgagccagtagtagtgatcttcagaaacaaaggtaagactggagaagattttagaagcttcagtataaaacccaagcctcaaacagagaattccaactttgtagagattactataaacatcacagcaatcaacttgtttctcattttctataaagttgagaattatttgttttttcaggattttagaatattctgaaccccaactgaacttaggcttagtgattactactgttaaatttgtatctccaatgtatgatttgcgggttaaaaaatccattactattggcttcgtcttgtaagattcagttaaagtttcattatttactgcactgtagagatgatggacgaggatgtcatggtcacataggattgactcgtagtttacattttgtatttgtaacagtggtctcataataagtttcagacttttattacttatggattcattatatttggacagaaatgaggtaaaattttcattattcattagaaacgaatattcaattattgacaccagtgttaccagtaacttaaccctagtgacagagtctaatctgttgatatgcggttcaatgactgtgaataagttaattaaagagctacaagggttttgtaagtattttaaacactttttagccataaaaattatatttacattggatgggttgtacttgagtgactccttcagacaatctaaaaactgtgagaaaacagtctgattcccagatttaacaaagaaatctaaaatcttaacacaagtgccatagtaaataaatgagaaaaaatcctctttattaattaaaggatcaattccatctgttaacttgtcaatgttaacatatttatgagggttcaaggtgttatttactgtaatatttgtcaagtctgtcatcttgtcaattatagatttatcaacttctgacgagaaatagattagaaataagccgtaaattagacctctgatgaacaatagattagtcctgttatgttcagggttgggcgcatcagactttgtaagtgttaaaaggttaagattttgatgtaataatccttcaactcgttctcgatgtctctttaaattcatttgaaactctatgcaaaccagtgtagaggctagtattagagcaattttctgctcagttataattgcttgggcttggtaactgagtttactatgagagtctagagatataaatacagcccaaatcattctatacaaatatgttgaaacacttttaaaacccttacacgccagtgttaaaagtgtaagattcttaattctttggacattgtaatcacttttaatagtgttactgtaacacgccttgacaaaatttaatgaaacttcctctggtatcaggggtaaaatattactcaaggaaagtgctgagagatatgaaagttcgtcatcaggcccaattagaaataagtaaagagaatttaaaatttgaggactttttgcaccgattgttggtactgaagataataattgaattcctgtacaacataaattcaaatctgtactactcaacatctcaagtaagataatttcaaacacattttgcctgaaatttgaacttgggtatccaatctcacctataggattcaccttaccaccggccacactgttcactcctacacatagattacagagttgatagttaaataattagtgaataattacctttgggattaattgggattgagggattgtaggagattgagatgagagagttgatgatgtgtttatttttcataatttgggcatgtgcaaatgatctcacgggcgtactttcagtgtataaaacaatctcaaacaaaactctaatcataagataaacgtacgcataagaattttcgttaatactctccaggagcacattggagatatcagcagattcaaagataattgagaacattttagccattttcgacctgggctgtgttgaaatggatctcaggtcagtttgggctattataactccaagtttattaatgtaagaactgagttgttctagagaaagtcctgtggtttttatggagttgtaaatctcgagggaaacctctggtaagctggaatatttggagaaatccaccgtaaagtcatctctaggatcagattcagagtactgatggtctgaaaattcatttagccaattctctagccaatttatatacctaccctcttccaaatccattataccaaatactcaagattccatgtgtaaactcaccataaaaacataaaatattaattttaattattaatttagtttaaaaattaaatattgtgtaaaaattagacaatatttgaattaatgtatttaatgaaattttccatatcatttatggaatctacgtctagtgactggttcatatctggtgattggtttaggtcattttcgccgtttaaattatatacttttggaggtttatatcctccgtattttactccttcataatattcttcaaacatatttctcatattaattggattttctgacatttgaccgaattttgaggtatttcccctaactccatggccatttctgacatatctaaaaaaataaatttaaataattttattactttaaagtgtgtaaagttgcttcgtgttttatggtttttaggcctttagttcctgtgatttcgggtactgtggacttgacattcaagtcgactttacagggtttaatttcccattgtagagcatattctggcgattttaagcaataactttctgcgactattttatacattttcgttctagtacattcaaattctatgtaatctggtatcacaggtcctgtatcccttgccaatgtgtccctatcacacattgacacctcagtgccacactccgatatgtaatccttttccaccactttcatcattattaaataatttaattaatttattaataatattttaaatctataaagacatttgtaaacgtgccattgagtcaatgtgttagctctataaaattaaatatattatgtgagattccatagtaaaagtgtgtcgagttgtgatttacacatttgaaatacaatttctaaaaataacattaaatcaattccatacctttagagtatcctcctgccacatcactctccataagctcaatcctatagaattatgagtaacaatgagatgagtttgttacctgttagtaaagacttttctcggtatatctgtgtcattccttatcgcagcattcagtggctataaacaaatatttaccccgtacaacaacagttaatagtattatagcactaagtatagatatataatactaagtatagttatggtatactttggagtctgtggtagtgatgacggtagtttcatcggtgaagtaattgggacatgacttcttcaagggctgaaaatgtaaacacaatgtgacgtacgtggatgatttcatcgactttccagaggttgaacggcgctcctttgtcaactaattcataaaaattcccctccttctccactatcgactttatccactttttctcctccgatttctacacacaatatttctactatataattaactatagtaataattaactatagtaataattaactatagtaataattaagtatagtgaagagtacgtggagttcgaaatttttggagattttgagggcgttgtttcgttcataaattcttagttcttgttcaattgacttgagtctggactcatctttcgaattcgtcagctcaaatactgaaaatatttacgtaattgtgtgtcatactgatggcctcgcgatcctccaaatacttgttatactctggagtggtcttaaagtttatcctcgtatcattatatctgatcactcattagtcacactattaatgtattaactaagtaaactgtgtgatacacttgcagaacgcgttttcgtgcgtctttatgttgttcgtagtagttggaggacatgtcataggggacaaaagagtgtcgagttaagtgacatcggcaaattgcacactgcgtataactgccctgagaggacactaaagtcaactttatatagtaaaattaccaacattgtttctcagcacagccatcacatctgcaaaaaatacaataattttattaatatttattaattatttaacttgataattagtaaaataaggggagaaaattacattttatgatcgcatatatcggagactagtaagattttatcacttgaaggagttataatttcaaggcaaattggacactcagtatccatcaactcttaacattgcgattgttttaatacctaataagcactcattataataataataggaaattcagctgaaaaaaagtaattaaaatataatttaaaaaattaaattaatgtaaataattaaattgagataatttggaggaattagggtaaaaagggtgaagatgttgtagtgggaatcattggcccgatgtgtaaacttttaacattttattcctcagtattccgcttaaatttcataatgtgtaagattactttttatcctctagtaatttcacagagaatttctcaaccatacgaaaattttcccctttctatcctctaaataaatattattcacatgataatttcgaaatattctgtaaaataataaaattatgtgtaaaataatctaaaatagtgtaaattattgtgtaaattaggaagaaaaaatgggagaggtaatgtattatataaaggttgatattcatgaggtgaaggatgtgttgtataaggaagaagttacagagcgtgagttaattccaaatgtgtttgttgaagctgtttttaaggattatagtaactgcactcagacgaaagaacattcttccaacgccttctttaatgcttcatttaactttacacctaaacttagcgcgtcagaatttgaacgcggtagaattatcgtagctctttaccataaagaaggaattgccagttacaagaaactcatcggacatcatgcctttagtctgccacttatatattcgaaacaacaacattgtatacatagatcctgggttaaagttttcaatcccaatttcccaactcataacgcggtataaatagtagttatgtagttaagcaggtagttaggtaatggactgattggagaaaaattttctccctctataccactcccacaccgtcaatagttaaataagttatagggaagtatgttggtatcgatatcagtatcagcccctggagataagcctgcggtgtttaaggatgatgacttatcaggtcaaggtttaggtactgacttagctcaaactggcataagatttaacaaagttccagagatgaatttaaagaattttatgttatatttaaacgtcgtttgtggcagagatttcatgaataaagatcagttttactctgaaataaaaccctcagttaagctgtcacactttggaatcaccgaagaaactccgccaatgaatgataatactaatcccgaatggcaaaccacactttacataccctgtctcactccttcattcgtatctctacagagtttaccatagctacagggttacgtagttagacacggtagaacagttgtacgtgtgtaataatgtgttaggacgagactgtgacggtagaattttataacggaagtgagttgttacaatttgaatctattgatttggtgcacttggtcaataatggatacccgcccaaatggatcaacatctactccaaaggcataggatctcaaagtattctctacacatttttacacagttacacattttacacatttctgcacactaaattctatactgtaaataatatgtagatgcaaatttgctgggtgggatattgaagtttttttcggattctacaagctcgctgacggattatttcggccgcatactaatcagtgcttcggcggaacaggtgcaaacgttatatgtcaagggcattaagccgtgcagatcaatttctctaccaccgatccaggaacgtaaaatcgcagttgatatttacgaaatcgtgtcattggatcataggtacaggtttattgaagtggtaatttcacaaggcatcttctccactaaaagccgcgtattccaactaaaaactaacggatcctatgaaatcaatgattccaccggcagattaaacgtttttgaaccttctttctcctgtatcccagttacgtagtcacgtggttacttagttatttggtcaattatttaccgtataatagtataaacagtataaatcttgtattagcgaatgatgatggagatttgtgtgatttttttatatatgtgaattcattgtctgatggtacttgtgagcgtgtggcatgggccagagtaccgtatgaaaaggttaaaaattcagaaactaaacccatgtggatcctcctcgcgtcattctccaatgatcaagttgatttatttaacattttattatcatttgaagtttcgtctaatgtcgccagtttcgagaggaaggaaaggatcaagtataacctggccagatacactttcagatgcatgatctatgaagcttttcaattaccctgcctcgaaactaattcttatcccacctcatacatcgaagttcgttacacagttacatagttaagaagctaagtattaccttagttacactggaaatactaacgatattatagatagaactgtctggagtgaatataaagactggattagcccgtggaagtacaaatccgtactatttctgttccaaggaggaggaggtgtatttacctacaaacctattactagcgccaaatattaacatcagtgtattttatgaacaaagttctgtattttctaggcctagactagtttgtactggccagtacagtttaatgaatgtgccacgggaatggacttgggcaccgcaatggctcaaactaagatcactcctgaatcctaaccataagcctagagtcttggtagcgtttgaattaataccttcaactgaactcatgaaatcaccggagagttttccattttttgaagacattgtcccgtctacaaggtcgtgcatactgacactggttttacttgggattaggacttttagcctactagaaaatcccagaatactaatcagattcaaaggatacgattccttcattgatcccgagtatcataaaaatagagttaactctggtaaaagtgatagagtgaactcacacaactctgtggaagaatttgatgtagtgaatataacaggaaaagccatgggctcatatggaaattggaatttcttaacgacccatgtgataaatcttgaattaccaaagcgtatgcatcaccattcgtgtttagatctgcaagttgtttgtgataatactacaggaccgctgggttccacagtattaacactgaatcaatatttcccgtggctaaatcctacagagaggaaacttagtactgaaatgttccgaatggaattaatcgactgtttccacagctcagcacccactaacactattaacatcaacaaaacacttgaggatgttaataatattaatgtggaatttgtagatgaaattgacgtcgtatcaaaacatcagtccaggtttcatgctatcgacagtaatactcaagttggtactaaatctaatagtatagttgttgctgctgactctttaggagataaaactgaggatactgatttaggagatgacagtacgagagaaaacacagtaataacaatagacgataagatggaggatgaactggatttcgagatattaattgatgagagtatgaacagtttaatgcgtgaggagatatcatatgaactcgaggctgaaatgaccgaagaggcgtttaagtataaaaaagcaccaattctcagatttaacgctaatggaatacctgaagtcattggcattctcaaattcattatacaaattcaagaatcatccaacaaccaacaacagcaactcaaacgtaaacacacttagtttcccttagttaggcagtttactcagttagtcactacttagttacagtacacccctaacatactaaaaaaatactataaatatttttagagatagagaagatgcagagagaggcggatgagacgataaggcgatttcgtagtatgtgggatgatgctaaggatttagtggttcgtgcatatattctggaggctaaaggtttatacactaatggtctaatcaatgattccttgtccattaaaaacatcaccggtgaagatttaacatacatttggatacgcaatatcgatgatcaacatacggttaatagtgggaccacgggtactactatgagaagcaagttgtatccgtacagtataaaagatttaaataatggtaaaaaagggttaaaaccgatttttaaccaatgttataatttaagttgtagtttaccagagaattcgatcttgagaatttcggtaatgagcaggtcagccctgagtgaagccatcattggcactacttacattgactgtgaggaccgtttttttaacacccgactgagagaattaatgttaggtgaattggcgcctgtggagtctcgagtactcagagctgaagaacaacagatgggagaaaccatatcccgtggagtattacgtatgtggttggaagtattaagagctgaagatgctagggctaaacctatacagaatttaggctcactagatcctgcgaattatgaattaagagttgtaatctggcgtgccaagtgtttctcagatgaaatttctgagatttcactctatgtctgtggttactaccagaatgaacttggtgagttcactcagaaaactgatactcactatcacagtaaggataaaattggtatttttaactggcgttttaagtacctcgtgacgataccaacggagtatacaaatttaaaattacaactgtacagttacacactgttgaaagatgaagtgattggtgaggctaatattgatttgggctatgaatttcacagagtctggaagaaaaacagactccactcaatacctaaattcactgcgaatctctacagcttggcagacagtagtaaaatcgtcggcagcgtagatgtggaaattagtcttttaaacgaaagtgatagtaaaagatacccagttggtgctggtagagaagaaccaaacagagatccattcttacccaaggttagtcagaatcgtaactttgttgactttgccgggtttggtgatacttttgtcaactttggcactaaaatcatttctggtattaaaaccaccggtgccatcatcgtcgtactttccatcttcgctctagccattgttattctcattatcatcaaataattttttcatcatttcatatatatattttatatttattttaacataatttaatatataatttatatattaaacatttttttatacttttctatatacatattgtataatactgtgtaatacatattgtatggtataaaattagttaatatgtgtaatagtttgatcccattggtaattttgaaatgtacaggtggtgaaactggtttttgagacgattatgacttgggtttggctttgaaagatgattgagactgggtgtggttcatgtgactttctggcccaaacgatgttatctccaaaccttaaaaaattaagattagattctttagcgtatactgctgagacggtattattaaattttacgtattggaactgctcgccgcagttatcagtgcctttcccagtagtcaagtagctcttcatatccagtggcgtggtggttccatttttaaaggttagattaaacttatttttaaccacgtcaaacgttagtgagcttggatagccttgaaaagggtctacccagtaactccagaggaatttctcgtcatatttaacggcgctgcacagaaagttgaaaatgatcttgaaaactgtgcctaataggttaaaatcacattgtaagtatgtgttttcacaaaatactccgtctatgaactttaatagctcaacttggtgattcatgtgtgttatgttcagccactcctcctttttatcacttctcacatataactccggcttattattcaccaactccaccttatgctgtgggtttttcttcactttacacactttcatccgttatttactttatttttactgatacataggtggattgggctatcaacaccgttaatacaccaagtcatccggaactaacactaactcattttaatactattgtacaacctatttaacctttttaagtggttaacacgctactgcacaagtggtatactatatattatatatacttaaaatactagtataccactactatatacacatatgtataaggtatactatagtaaaagattaatagggtggtacaagttctttatcttgatgtgataaatcagcgcttccagaactgctaaaactatgtactactttatccaataaactcgtcaaactattactcaacctctcaccaaaagataactcactagacccactctcccaaattttttccacgctatgttcacctgtaactttatcctttgtgtgctctttatccaaattagtatccatagtttgggaaatggcattggattcaccactagaaaacgtattatcctcaccccgtaacgagggtttcgaatacttttgataggactttttacataatttaaaacattcgtcgatgatgacgacggggaatgaccagattagaacccacttccagtcataaaagtccagcggtaccacattaaacaatgaagaaaatagtggaacatacaatattatacagtgaatgagtacgctgaagaagatggcgcagatgaggtatggattagtccagggtgccatttttagtagcgaggaatcctccgacagcgcattcagcgcgttaaacatttctaaaactaccaaagttgtgagtgacagtgtggaggctttaactttccctagtgtaaagtattcacagctgttactcatgtcatagagcagactggcgttaaactcttcccagttcatacaattgctccaattcattaacttttttaaacttatgagtgtgttcccctcgttaggtgagacccccagcacgtagtactggataaaaataccacaagtcgccagtcctacgtataatccaatcaccaaataacgtaacaatgttattctgtcaataagtttatcattccgatgtctgggttcccgtttcatgaccagtggatctggcgggttaaaccctaacgccgtggctggtggaccatcggtaactaaattaacccagagtaattgtactggtaacatgccctccggtatcccaagcatcgccgtcataaatatactcacaacttctccaatattgctgctgatcaggtaacgtatgaacgctttcatgttactgtatatgcacctgccttcctcaattgctgctacaatcgtcttgaaattatcatcagccaaaatcatatccgaggcttctttggccacttctgtgccatttacacccatacttactccgatatccgccatcttcaacgccggtgcatcatttactccgtcacctgtcattgccactatctcgcccagctccttcaatattgatactatactctgcttatgcttcggctcagtcctgctaaacaccagacaacttttagttaacagttgcctctgggcgtcggaacttaaagattcaaactctttcccagttaaactactaaatagtgaagttctgggatataatattggactgtgtgtgggactgaatgtgggactccgggggtcagaatttgacatccgatgtgtgggttttatgatcccaactttccttgcgatggcttcggccgttaatttattatcaccagtgatcatgataactctgataccagctctcatacacttgctaatactgtcctttacctccggtctcggcgggtccattatacccaccaaacccaaaaatgtcatgtccttctctatcctactgaaaacattacttgttttcacactattattattggactgtgtgttctgactattactattggaatgtgtgagggagttgtagagatctaaatctttttgtgaggcttgtcggtaagagaatgctaagactctgagagcttcatttgccaactgtttgacgtggtctaggatttcatttttttcagattttgctaatttgtttactgagccatcgggtaacatataacttgtacacacttccattatactctccggggctcctttactatacaaatacatcttacccctggtgctactgtttctaccactacccctgctactgcccccagtacctgtgttactagtgttaccacctgtgttcatattgtgggagcaaataacggacatcattttcctggttctgcagaattcgagagtggcttctttaatcaagtatttccggtataatgcggagattggagttgggactgaaccactgccagttctaccagttagctgtgccttcttagatctagaagtttcagtacggtttttaaataccacagcgtcatcttccggattgggtaggggtgggttgtgtgagtgtgtagtgggtgacagtgtgtcagtgtcatgtgtgttattgggattgggagagtctgagcgactccgatcaactaagttactttttggtgagttctttttccatcttttcatcttttttatgctactactgtcctcgatgggtgataagaagattgcttgtcccatgggatccaaatgtgatgaatcacactgtgtcaggaatttgcctaaattattcaccatctcaattatcgccacttccgtaggctctccctctaataccaagtctcctcccacaccagtattgtgtttacgactgtgtaaattggtagtggatatggtaacatcggagcatagagaagcgcatttgaggaaagtgtgtgttaggttttccactggaccgtcaaatgactgtgctacacacatgccactatcaccaaagccacccatcgttactcttatcccatctcctaatcataatacagtgtaaatgtgtaagtaagttgtgtgtgtgtaaaaatgagtagagtgtgtaaatgagtaaaatgagtaaaatgagtaaaaatgaaaaactgcgtagtaatggaaaactgtgaagtaatgtgcaagctccgtaaaggggtaccatgtggcatgtgtatgtatcttaatttattttgttggttgaatagatttacaacgactgtggtcattttattagttgtgagagtgccagttttatcgctgcagatgactgtagtacatcccagggtctcaattgacggtaatttcctcactatggcgttttttttagccatttttctagtacccagtgccaggcatgtggtgatcacagctggcagaccttccggaatagcagccactgcaagggcaatcgcaattttaaaataataaatacaacccctaaccacagatccatgcgctggatcattaaagttcttcacattaatcagccagaccaagaggcatatgatacttataactttagaaagggagttaccaaagtcatgtaacatcttttggagcggagtggcggtattttcagtacttgcctcgattacggcagattgtattgtaccaatttccgtattcatacctacagctacgactactcctataccagtcccactacacaccgttgtactaccaaataaaatattcctcttagtctggagatcacaatgggcttctgatttatccagagcatcagtagtcttgtagattaggagagattctccggttaattgtgattgctctactaagagggtggtggagagtatcttcactaatctcagatctgccggaattttatcgccatttttaaccttgacaatgtctcctacgactaaattctcagtgtcaaaagtagtccatacaccgtttcttaaacaatttgccagtgtgggttgtaactttttaagtgcatccaacgccttctcagcattagcttcctgccaaactccaaccaaagcattgagtattaagatgaataagatgacaattggttctatgaatgaggaaatgtgtttcttttcatgagggtcaaaacaggtaaagaagaaactaacaatggcggcacttaaaagtattttaacgagtaaatcatcaaactgttgtatgaagaggtggaggagtgataatttcttaggcttaagaaatgagtgcgatcccaggacttcacggtgtaacagcacctgctcgtcgtttaaaccatagtccaaattcaccgaataatggttcaaaacctcatgtgattcatacacatgaggactcgccaataacttcaatccctctgtcatcacattattaatattattttattatttttacagtgtgagattggtgatattggaaatattattaattattttactgatagagggaaattttgtgaatttcctccaaatttgagaattcgttggaaattcagaaattccgtcaaaagttaaaattgattaaaaagttaaaaattggttaaatgtgttaaatgtgttttaattttaggaataagaggtaacattttcttaagtgtgatttaaaaaataaatgaaacatcagtgaacaaaaataaaacaaaataaaatcgagaaaaaaattaaaatatattacagaattaaatttgaaaataaattaaaattgagaataaattaaaatttgaacagattaaaaatgagaataaattaaaaattatagtacaaaggaataatacacggaaatactcttaaccggaaacagtaaactgaaataataaactaaaaatgtgtattagaccaaataataaattcaacacattaaaatatttattataacctaccacacatcaaatttgtgacaccattagaataatttaattttctatcgcaatttaaattttaatgtagtttaaacatttttaatgtaaattaagtaaattttttgaatgtagtatagaatttaattattttttgagaatgacggaaacctcaattaaagaatccttaattgaagaatccttaattcttgaacctttgattgaggaatcattgattagagaaggattagtagtagtgaatggtagaggtcctgataataagcttttattttataatccacctcaggtttttaaccgggacctatcactcctagtgctaaaaacttttattcttcaagaaaaaaagaaaattggtaattcctaacattattttattatttatagtataatttaatttagagagtgatccgaaacttggtaattttattggtgttaatatcctcgaatcattagccgctactggtaccgactctagttaatactataattaatgctcgagttatatagtcaatagtacagttggttatatacttatggtagtagctgaggatacgggttcgaaacccggtcccccttagggtattatccatgccatttcaagccaatagctatacagtagttagtagtatagtttagggcctatttactcagtgtacacagctaattttttttatttatgaattttctgatgcttaacaatgttaattctgttgatttatgtggaaatttggaatttttaaaaatttcgatttttggcctaaaatggcccggacccaaaagtgacatttgggttttgaaaaaaattgatttttttagactattgagaaaattaaattaattaattccaaatcatttcaaacatctttttagacatcaaactacttaaaattagttataaaagctaattttaactatctaaagtttgggctttttgtgcaccctgaactacacttgacagggtattagtcaatgttatttaactactaaagtagaaattactaattattactttaaaaatagataattctggttagaattattagtaaatcatttgaaaattttttataaaataaaatttctgagctaaaaaatgttacaacctccccttaaatttacaaaatgaatataaaattccttaattataactctagaatactttaaaaactgttatctaaacatttacattactaaatatttactgtactacttactttttactataaccatgtgcttgacatgaccccgatagtccctccagggtacccatttatacccctaaaaatacacttaacacccttaactaactaaattctacacctaatatgctacactatatatattatgtatatagaaatgtataggaataagaggaataagatatttgagggagttgggtcccttggtcggtatggtaacatttaatgatttagaccgtaattcagccgaaatgatccttaaaaacttaactttaaactctatgcccaggagtaaatacagagtaacatgttgtgacgctaattttttatctaatatcctcactccgccaccggacatcactaaacatttcctcatgtcaaataatatttacaaggctcccgtaggctcttataataataatactaacattaataacatattaaaacagtataatcataccatggatcaacatattaatttactactcctcaatcctagtgacggtgacactactgaccctgtgaactctacagatcagagcatattcagaaatgtagtggatataattgatttggatccatattcgagtgtaacttcatatgtagattccgctgtaagatgtgtaagaagtggtggaatgttgttgataaccagcactgacatgcctacactgtgcggtaataatcccctggtatcattttataaatacggcgggaccagtttcaagtcacccttctgccacgaattgtcactcagagtattattatactctgtgatgttaacagcaagtaaatataaacgtgttattgaacctctcgtttcctgtagtatagatttttatgtcagggtttttgtcaaggttgtgtactctccagaacagtgtaaaagagtaggacagaactcaggactcatactattatgtgtcagatgtcattcataccatattcttcctctgtgtcaggattacacaggtagtattagtgagagcggtaagggtgttgaaggaggtaatacagttagtcacaagaagagaaaggtggagggaattgattggagtaggaagtgtgaggagtgtggatcaagaattaaaattggtggtccaatttataccggaccactacataatcatgagttcgtacaagcaactcttcagactctggatactgatcactctagttctaatactactcagaataccataggaaatgatactcagaatactatggaaaatactgtagatggtactgcggagagtgtggatattggaataacaatgtggaagaggataaggggcttgttaacaacaataaatgaggtgattaataattaagtaattgttgtttaggaagtggatgtaccgctttattattccatttcggatttatgtcaaatctggtcactcaccaccatcagcccaattcttttcaagttcctaattacccattagttacatactataatatagttagtagagttaatagtatgttaggggggtattgaggggattgggatataaggcttcgaatttccatagggatccgaattcgataaaaaccaacgcaccaaaccaagttgtcatggacatcatcagaacacacgccaaaaataccagtaaaacctccaatcactccttcttctccaaacccatacagtacacacatactattaccattatttacatattactagagtatttatatattactagagtatttacatattactggaatattgttaatcgtgtgtttttagaacggttgggatagatttggatatgaaggtggctaaggtgaaggatgtgccgagatggttccctaacccaaccagtcattggggacccaaaaaaatgcataaaactacttcaacctccctaatctaatcacataaacatatattttacacatttctatatacataatatatatagtgtagcatattaggtgtagaatttagttagttaagggtgttaagtgtatttttaggggtataaatgggtaccctggagggactatcggggtcatgtcaagcacatggttatagtaaaaagtaagtagtacagtaaatatttagtaatgtaaatgtttagataacagtttttaaagtattctagagttataattaaggaattttatattcattttgtaaatttaaggggaggttgtaacattttttagctcagaaatttattttataaaaaattttcaaatgatttactaataattttaacataaaccaacagatttaacgtctcttagcatcagaaaattattataaagtggaaattaactatgtaagagtaaataggccctaaagtaagcccttaactactatatagccattggcttgacttggcccggacatcatatatttgggtgactcaaataatatttaaaattcgcactgactgaaaatattcaatttataacattagccatcagagttttaagttgaggaatgtgtagattcgagttcgtgtctgagattacacatagctttggaatagttattggaatactttagtatttgaaatttttaccgcaatattttaatatcttcatcggatcctagtactttcttctccataatttctaaaatcgtatagtatattttatcctcgacattgaaattttctttttgagtgattaaattattgaaaaactcaaactctttcccatttttaaggttaaagtctcttgaaaagcccaaaatgcgttcacttaaatagttaattgttatatcgtcaatatgagccttaattttaagtaacaacttctcaatttccgctctataaagctgtggttcggattttaaaaggcattcagcataattctttattattaaatccttctcctcctggtcaattagatgctcgggagtatttttaagctcgtctacatatcttttcttatcctcggcgtttaaaaggtttttggctatgttatacaatacacaaactacgctacattcaatatattcttcggaaccttttagtattaactctgaaacaaataaacctcgaatatcacacaaaggatcatcaaaattaggcgggaaatgggaggggttttttattaatcctttatcgtaaaacttcttaaacactaggtgatacacagagtctagtttagctcttaattcttgttcctcgggactgtagtcaatgggagtaacagaagtgtttatcaccgagtgagtatcaatttgtggctttttataagttggaattttagacgtaatacgattgtgcatagattgaccatcggtattagtttcttgctccaagtcaactgagtacatttcattcagcctatttttgacatgttcgtgaaggtcagcatgtttaaagtcgctgaaatgttttctaaacgtatcactctcataagttcgaagattcttctccatgtttatcaaggccaattgatttatttttttctgtatctccaaatgttcttgtttagttattaatctatcgaaaaactcaaactcattacaatccttaagaccatcattatcttctgaaaaagccaccaatttttcgtttaagtagtgaacgataaaatgataaatatatttttttaagacggcagatgatttctcaatttgggttgagtccattcgattattgatgagcttgattaacaaatccttttcgtcctgggaaattagatgctcaggagcctttttaatctcatgtgttaataacagtttgtcttcaaaactcaaagctcttctttttccggtatctatgataagttcgactctttttctaataatgcaatcatataaatataataaattgccgctaattgaggtattttgaacgccgtagatgggatcattaacagggtgaaaactagaaccatcaggtagaaacggtttatcataatgcttcttaagcagctgtagataaagagagttaagatgacctcttaattccttttcttcggtagtgaagttggtattaataacgggagcgatagttactttctgttgatcagtttgtgacctgtcacaattgtaatcggaatcattggagatacaaatagaatcatcagactctacactttcgtagtctgattcagaagattcaacgttcttggtatctgagtaaaaggtgtcaattgaatcctgtggacagagatccgagttaacgttgacatcaagaatagtagccattcttaaaaatattgagaaatttgtaattgataaaatcctgaataaattaaattaaatcattaggtttatcaagatctagtagggattatgggataaatagatctgagtgttaaggtctgagtgctaggatctgagttactattgtaatattttgaaagttaaaaataacaatacaggattaatatataactataatgatacttggtttggccatgatagctgtgacgtgggggactgctgcagttactattaagtcaagtaaatataccaatatattttgtagtcaaataacaggatccggctcatttcaaccatagtaataagtggatagtatactaaatatttagtattatagattattgttgacatttattgcaatgactgtggagctaatttgggtactattcacctttattgagcaactcctttcacttagtttatatactttcctagttatttttaactccatgaactcctccctttctattatttacacttacttattgataagtcacctaatttatctatacacacccatactaataatacatttatgtaccagtggtaatatttactaggctggaagtatgaagaggctactgaggaatcccaaaagtacaagaagggcaaatttattttagaaaaggttccctttactctattcatatttcaagacatctaatgaatttttaggcactgttgaaaaacaataatccgaattattccagtagtgtttaagacgataatgatgttactgatgattaacctaagactactccaattctagccattaaccattactatttggttcaacacacccaactgatttcgcacattttaatcatcatgaaatattatgactatctatttacataactgcttatcttaaatctatgtaataggtagtaagaacattcaatgtaacacattaggggcgagtgtttgaacacccgtttagactacttgtatatacaaagtatagatatattaggtttcattgtaaagtataaagtataggtacatcagtaaattaataaattgtaaattagtgttaagggccagtgtaagaccgtcaaaacagtacataagtttgatgaaacttttaaaatttagaaaaccccctcatcagaacttttggggcactatgatacagaatgagtttaattgagaatttgaaaatcatttaaacagcttataaatcgaagtgatacatgactgtaattaatgttattgtttcttcatttcaatctttttatatttgagttaacaactgttacttgtctgggtcttgggtgctatctaaatggagctgttaaatacgtataattcattttctaacatgtcatataaaagaaaaaccgaaaggtgttctccacattccttaaattcatgaacctcacccttgtaactaacactaagaacgtcgacaagaggaataatacagaatgaacctgtaaaatcaaacgtcaaatccattgtcgatagttttgagttccttttaatgattttcaaatctctagtgtttaacatcaattttgaaacatcaaaaaaattttcactacgtgctggcttgtgaaggaatttaactgtattgtcattaaaaacattcactaaccacttttcttcttcataagaatatagatagactgctttaatagactcttcatttaactgcctttcccagataacattaccgttatccaatattttattgaatgatgtatctttaggagctctataatatctggaatttgggtataaatcaataatacaatcatcatattttcgtctaccaatatccagttccataaattcaacccctgtattatttgaaattagttcttccatgagtttacgattcatcaattttatcaatgcctgacagggttgtccaggtaccaataattcttcaagtttggccataaatgtagcaattaaatcaaaaaattctttttccgttctcttataataatcctgttcagtttgattacaatttgatttattatagtaatgcgaaagacatgattgaagattacaaagcccatccacaatagaaagttcttgataatgtccctcactttctaagttttctacagtagagtcgtcaacttttaagttttctacagtagatttatcacatttgaaaaccaattcaattggatccgggtttccagagggtttatatgaatgagcttcaatatttcctgttaatagatcaattgaaagagatacaagtaatttttcgtcatctttaaaaataatctcccctttgtaaattactttatctgccagaaacggaaaccatattttaagataacgcccttcaaactccttaataagttcgttgtactttgccattttaccgttaaccttaatcacttttaaatgattaaaactaaagcattcctcttcaactaatctaaatctgggttccagatttgaacttttcagatgtataagtgaactgtttcttcttaaaattgtaatgaaaaattcttcagcatttttatattttaggacatgtgttgcgtaatttttagggtcacattcattccaaatacattcaagattatcaaatacatgcataattccgaagcctgttttcgcctctatagagttgtaatggtagtcagacataacattgattttgtcagatggttcacgttgactaaaatcgacgttaattagtttaacatttcctgaatctctactgctttcattagcttcacttattacactacgctcactggttccaccgcctagggctgatattaaacggtcaagaacactcgcaggaattttagaagttacattagaatcgtctttaagtttttcaagttttctccttgtggcttcattcacaagcctcttattgcaacttcttatctttggatttttcgagttacgaaacttctgtaagtcagtttcgtcaacgtggatgatttccatttttgaattatggttttcattcggtaaaatgtgttttgctgttattttctagttgtttctagttgtttcttgtcgaatgtagtaaattttgttaaatatctgttgggtgagaccctgtaatatgtgtagttcgtccccatcacagcgagtaggtcaactgcacttaggggcattacacgcattacctctcataaaaatgaaaatttgaccatgcatttacatatacaagtagtattagatgtatataatgagtattgaaaggattaaatttgattgattagccgttggtggttgagcaactactttggtcaatccatactatatagtaaatttaaagtatatataaattagattccataaagtataaagtgtagttaaattagtaagttattgttatgctagagctgttactcattgattaacttcatcattggtatcagtctcaacattgtgtaaatatcagtcagttattgaggttatacatatccttagaataatagtccctggaataattttacatgtttataatagtttattggaatatttttatcttcattggatcatagtacctcttttcccatgattcctaaaatcccataatatattttattctaaccgatttcctgataatttctcatttacaggtagataacagtagataatagtgtgtagagtgaagttatcgaatattattatagttatagtactagtaaagtaggtcccttaaccgtgtgtaatcgagcatttcatagtaaataacaaactttttttcttaaatttaagtaatttatgtctaaaatgataataaaaatgatttaaaattattgaatttaattttcacaatagttgaaatttttttattttttcggaacctaaatgtcacttttgggttctgaccaaaattttacaaattttctaaattttcaaagaatttatttttcagaattttacacacttttcaacagatttaacatttttaaatatataaaaattataatttaaaaataataaatatatacatagaatagttagtattatagtatgtgtttgacattgttccggatagtatataattgggcgaccactatcgtatatagttcaagctaatgaattcttgtataactaccaagaactccaaggtcaagcaagaattggcaaggatagtccaatcccaggggacctctccttaactattccttaacaccttaattacatactttactcaaaccatatacttaatttttcagtcttatatagttaaatttactgttatatggtgatttgtggtttaatttgggtattaaaataacgtaattttacctataaaaatcatatttttacaaaagataaatctaaactaaacaacaataaataaaaaaataagtaaaaaagggtgaaaactctgtaaaaaggggtactgtgttaaaaattagctagtttgttaaaattggaaaaaattaaaaatattacaatttaattattattttatttataatttgactggaaaaattggagaatttattttattttattttgagttgatgagtgattcaagtggtgtgtctaatgaccttgaaagggtacaaagtaacagaaggttacactctgttgacgttatttggttatttttaggaacaataacaacgtttggtatagtaatgtcatcaatatcggcaagagtttactcacctgtgcttaaaattccgcccgaaaactctggagcattcgagtcgaatttactcacaagttcaatcttaacttcaagtttcgggatcataatcgcattcctattcttcccaataaatgtattactgattttcatctcacttgtgctcacgttcgttacaagtttttgtgtgttcctgagtgtagtagtgaggatatttagctttaaattcttctatataatgggaaatgacattggctgtacattcctagggataatagaattaattggagtagcatctgtgaatgataagtttatacccggaaatcctatttacaagatgttactatatcaaattgggaaaccaataggatatctcctagtcctaataatcacatcattcttagaactccactcttttggaggtgaaaaaacagattttctacaagaatcaaacatcttcatgacatatcaaatgatgatactacttttactcgggatcccaatcctaattgtcatgctatactatagtataaaatctaatgataagcagcaaaaatggcgttcagggaacctaataaactcttggaaaacatgggaaaaggcttcttatctgtaccaatgcattaagccatatgtcatcatattagtcatcattgaatcttccgaagctttcttcaattcagccacacgtaaacatttactcagtttatctaattttatccaattttaattagttacaacagtgtgtaatttgtgatagtattatttctgatggacccgtttccacactttaaagctgcgctaaagacgttgataatattcattttacaccaagtttttgacctggttggccgctgtattccaccgataatacaagaaatcatagggaaatacaatttattcctgtttcggatacgttcatatgacgaggagagtggtgatggaaagtcatatctagactcaaattgtcatttagaacaagaaaaactcgccattagaattactaaaacttatacaattagtaaatatgttatttgtatcctggttactcttcggattttcctactcctttgcatatttttccgcagacattttaagtctcaattcctcaattttatgaccagtttcccagccgtaatactggttacaatgtacaattctctggtaagaggtctcgtagtctccctagtctacacacagttagcttcaattattgagacggatgttcctctaccaccgaaggagtgggtttttaaggatttaagtgactttgtcggaagttattacaggaagatggaattatatgtagatccatacctgatggtaagtttaacaattgcaaaagtacgtgtactggagttaataccttatgtattatttaactacattggattcaagtataatagaattttatttgagtgtgacttgttttatgagcagtatggccactggcctacggatgaatttaagtcgaactttgtcaagttcaactggtggataaagatgattatcacacccattctcggtgatatcaagaatctattcggtttcttctaatatactatacatacaaatatattatactataggtatattatatataatatggcatatagtaatagtagtaatggatacagtagtatgatattaaatgttaatggtatcattgggtttgaagagagtgttacccatgccggtgaatggcgtccaaatgttctgtttattcaactccaactcattgtaataccaattcggtaaaccttcgttactcacattacaaggcgatctccaaactgcaaatagtatttagtatattattaatattatttatagtgttaatattattgatagtgttaatggtataactggaaaatgtgttagaaagtacttttgttgagtaatgagaagatgaggaaagagatgagaatgtcatagaggtataaaaataattgaattttccgattcaaatgcatgatccacactttctaatcagaaataactcaacttgttaatagttaattcacctgttttatcagcgtcacaaccaataatagacacaaagttgatgataacgttatacctaaaatacatatacacggtgctataatatggaaataatatgttaatactgtaggtcatgagtgtgatgatcaaaacaactgaaggattaaaaatgaaaaaaaatgttaaaaatcctaaaaaataattacagatttgtgtttataaacatgttaaaatatgtaaaactgagtgaaaagatgcctaggatgaaattcgcgattgaattgccgaggttggtgaggtaaatgtgtactccggaggataagagaatgaggattgacatgagaactaaatgcgatgaatttgagccaaataaatcacttttcaaagtatccttaagctcttcatcgtaatccattttcaacccattaaattttaattctacaacgttaaattatgaaaatattaacattgtgttcacacatttaatttataattcaacacataattagagtaaataatttggtattaaatgctcattgtacagagaaattgagattttagaatttggagataaattaacatatttatggggaccagatgtcgtttaaaaattaataaatttttatatttattcattcaaatttttaaaatttttctctctcgagagatatcataaattttatcccttaaaaattatttaatctgattaataattttaatgaattaattatgtaaatgaataaattattgtattattagtgatataatgtggaattggaacaattttgagaatttttggtctggtggtaatatttatcaaaatgcagctcatacgtcaaattatcgttgtttctcagtctcattcgcaggtcgcgaatccatggaacaaggcaataaaagttctcactcagtcatctatttacttaatttgttatttatttacataatattaattatttaattgtttttgtagtattattaccgcaatctgcgttacatgagttggcgagtcggaatatatcgtggccgatgatgtttgagattctgaacccgaagaactacaagcgtaccaacggcggggtcttagaattcatctccgaagaaggaacttgcaatattccatactgggcacgtttcctaattagttttctcatttaaatttattcattcatttttttattaatttatttattttttatttattcatttttttattaatttatttatttaattttttattttattcatgaatattttctattttttcacttttatatagttagttatatcattatttcagccttaattatttattatatatattaaattgtttaggtgatgaacaatttgggtttgaatgagggagatgtggtaacgataacaaatgtgtcattgcctaaagccacctgggttaaacttaaacccctaaacgaagattactgggatatctcaaatccacgcgctgtgtaccaattaacttagttgtggcattttactaatagttatgatatataactaagtggtgtgtagattggagaatgcgttgaggaattatgcgacgttgacagttggtgatgtcataccaattcattacatacaaaccatttacctcttccacatcatggtactacttgcccagttaccacagcacacactatacaatcacttgttagtaacaccgttgtgtaggacctaaagcctgccaaggcgtgtagtataattgagaccgacatggaggtggagtttgacatgccagtgccggagccaaaagaggaagaaaatgacatggaaacggatccggagcctataataggcaaaagattagacgggaaaaccccaagattagctaaaccaacccctgacactactaataaaacaccctggaaaaataaattacccaatggcatcagagtatcaaactactatttacatagttagcaccttagtatacaagggtataatgtgtttcaggtgtatgatgaggaatatgagcgtatggttcggaacaggcggatttcatattctcgtcgataattccaatttttaccctaaaattaaaatttttcagtcttaaatattaattttataaattttttaattttttacaagatttttagaatttatgtgttttaatttgcacatgtgttgtatctgttgggattctggaatctcatgacaatgaatattttatttactgaattaagatgttggatgatgatagaaagtgttctaaggatttgaatgagtactataaatgtttaagtggcagtggcagagatccttcaaaatgccaaaaacaagaattccttctccggaaatgctccacaacgtactattaacactattttacacagttaataacataataatatcagtaaaataataataattttagcgacaaggagaatgattactgtttgaatgagttgttggagttgtacaattgtatcaagtaagtgaaaaataagttgtaatattgtttaggagaccagatgtgaatgcctgtgccagtgagtttctcttatttcgggaatgtaacagacccgaaggacccgaaattctcatacaagtacgctcaatcacaactaaatattaccctaactcctaaattacctctaaatactcttaaataacctctaaatactcttaaataacctctaaatactcataaattacctctaaatactcataaattacctctaaatactcttaaataaagcttaaatatgtataaagttagttggaaaatgattaggatgacaagtacaagttgagtttgaggcatttggacaagtacaatgtgagttcgaatgtcatttgtcctgtcaacgctcccaagagatcattgaaaacgattaacaggttacttgagcaaatgaaacaagtcaccggattcaaaaactacaccgaaaaattcacaccacaagtcaaatcataaatattatcaccagttaacatatttgttaaaatgttatttgagtatattaatgattgtgtaacgcagtagttcatgtgagtacggatgtgataacttgtgttccttgtgggttgagtgagagtttgaagtgttttttgaattggttagagtgcatccagcggttcacttggtcttcgccaaacttgtacctcgcacagattttcaaaaacaacatcacactgatgctactttcccgagattcaagagtgtcgagttgtacgtcggtggtatcattacgatgcatctggttcacgtattgcttacgtagctggacctccagctgatgctgcaaggaacccttcaataactgagccaataactcgtcattccctatattcacatttactctatctgtatagtattgtaaaggtatctagggtatgggtattagttatagtactacagaatactgtgaatactaaaatactgtgaatacctgtaaaaagagctctatatcttgtaaactccatggataatcttgtagccacggaatacttctggctggatatataactttctagtaacatggcaattgcaacatcaacatcgtctgacgtgatcacacttgataatctcatcttagcgttggcctcgctaatacgaattatactctcaatatgtctcaatgtcagaggatacccaccaccaaatgttctttgtcttattctactgtagacaccgcttagtttcccctcaatttgactgtaatactcctgggctattacgggtttcacatgcctcctcgcatagtagacatacttcttaaacacttccgtgggcaatggctccactatgttagaggataatagagtattttggagacgttttaggacattctcgtagtcctccacgttatccaatcgtgggtgtagtagttgatgatttgttactacgtattcggataataacagatcctcctcaatgttgggaatgtcacggagcactacaatgaggtcaaacctactcaggatagggtctgagaagtctacattctctttaaaggttagtgcaggttcgtagcggccgaatttaggattagcagcagcaattactgagcatctggcacgtaaacttgtgactatcccagccttgctaatgctaatactctgctgctccatggcctcgtggatactcacacgatccttgtcagtcatcttatcaaactcgtcaatcacacaaaatccttcatcagccaataccaacgctcctccttccaggctccattcccctacacattgagtttagtatttagtacagtataaatagttaaattagttagaatatccgagtggtatgtgtataatccgggtgaactccaatgtcaagcgggaattggcccggatagtagtgaggcgggggactaccaaagggagcttagttatactattattatactatagaaataataatatatagtgactctggaggggaaagagagacccataaaggtgaataactaagtaataaataagtaaaataagtaataaataagtaaaataagtaataaataagtaaaataagtaaaaaataagtaaaataagtaaaaaataagtaataaataaatgtgtgagcggtagcaagccccgtaacgcacctgtaactggatctttccttacacctgctgttagacctacggcactggcaccttttcccgtggttaacacacttctattcgctgtcttgtgcacatactgcaacagctgtgatttccccaatccagggtcacccaccaataacacatttatgtctcctcttatcctatgtcctcccatagtattacccgtgttaacaccatttgcattattaacagagttcccagcgccagaattaacactatggagaatgcctttgggcactccgccgaatagggcagacagtaccgaggctttagcggttttgtgaccccagagtgtgggagctactgaggctattaaccgttccctaatgcaaggatctttgctaagccgtttaatctccgcaacatcctcgtcagttaactcaaatgaggcggaatcttcctgacgttcaatgttattcgcttccaactccgtgtgcagaatcgggaacccgtgtttaatattaagtcccaagtcatatctcgtcttgtaagtcccgagaacatcgactaagtcgcctggtttcacagagtcgacaaagtcaccagtgagaattacaattttctgccttggtgttcggcctgccgggacactactcggcggttcctggatagttaatttctggtaatctgtgtactcagtgttgatcctgtccacgttaaagcctggagaatgacagtatggacaacgcttggggaacactggcttaatcacgtcactgaagtaaatcggcaactcactcaacgtagtgtcacaagcattacactttaaatataatactcgtaacctcggtaatacagagccgcgccttatcactattcctataacagtattagtcagtttacaaagtgtgaaaagtatttttagggtaaaattaagtaaattttcataactacgaattccggagagtcggggtattttttattctagctatactattctaggtaaatttgagtaaacgctcataactactgtatctggggagtcggtgtaaaattaatagtactaaatatatacaacttatagagtacctgagacacgaatgagagtattgagttcagatgaccttaggagccccaattgtgtggtgaatggccagtctgtgatggcaactttgcagtaccttttcttgtacaattcttccttcagtttactaacttcaaatgttaaacagtcgtgcagcactggtaacacatctgctggtctaaactcaagccaagtaatgacattctcacagtgaaattgcaacaaatgctgcgctgccacacggagtacagttttatcctcacgaatcatcgtggaaattttactcttgtagtagtaattcggagcatcctcagtcaacttgaaacgatacaaaaagtatctaaaaacattacagtcgtattgttaggagtttacagttaaacataataactactatttctacctatataacttggtattgtaaatagtaggtataaagtcatgtagaatctgataacgtctaattctggggagtcggggtaaaaattcgagtattatagcactatagttaactactatgaataataaaactctataatttgtacctaaagcagcaatcaatggcttgttggtatttatcgtcgaatgtgacttcgttggggttggagtgtagtacggctttggcgctctccagtcttgagagatccggcgcttcagcctctgctgtagcgaaatctgtcctcctctttgtaactctctctgaaatcctggcgaaaagattgtcctcaaattcttcatcggccatttccagaatcttacgccagagttgtttatgcattgtgcggtcacctggtcttgctctggttctatcacggaaacgcattctcctttctgctgctctacggtctttgggatcaagctcatacaccgcgtcatcaagcatgtctggctcatactcgtcaacgttttcaattcctaacttggcaaagccttgcatttcacgttcaaggtcacgttgtcccaccacaaaccccgtctcgtcctcatataaatcctcgccctccaactcagcctgctcctcatccttgtccctcagaccctcagccacaaaataatcatccctgtcatcgtccctatactcttccgggtcgtattcttctacacaattgtgtaacgggggtaatttgtacgtaaatttgtcagtatatgtcaattgtgtagataatcaaagtaattaataaatttgtaaatgattgacaaatttgtaaataattaataaattgtgtaaaattagtgtaaaaaatgtgttagtggtaccatcggtgtctagatgatgttcgtcacgatcggcctgaaaaattaattaattgcgtaaaatttaccattttagtgtgaaaaataaagaaaaaaaattaataaaattaaaattttaaaaaataaaaattaatacacaaaacaacgtcatggggatgtgtaaaccacaatcagccaaaatttctaataattttaaaaaattaataaaaaattgggaaaaaatattgaaagaattaaaattaaaattattaaattggaaattgaaagtttgggataaaattttagtcggcccagttcttacttccaaccactaaaaataaatgtgttaatgtgtaaactaatcatgaaaatgtgtaaaatgcattagtgagttaccggtgcagttaaatccgacctggcagtagacgtcttgatcaccaattttaagcttaattttaccattacaattcctaacaaattattttaattatgtaaaaattgtgtaaatatgtgtaaaattatgttaagatgtgtaaaattatgttaagatgtgtaaaattatgttaagatgtgtaaaattaagttaatatgtgtaaaatagtgtaaatggtgttggtattaccagccgcagcttccggttgagaagagtctcgggattgcgaaaatgggatcggattcctgtagcttgatctcaatactcttggcattcttcataaagaaatccttcgtcatcatgtcacctatgcaataatttaacttttttacgtaatttagattatttttagaatttttagtagatttaattatttttagtaattttgagaattttaaattttttgcgatttcccaagtatataacagtagttaacaatggtctacagtagttaacagtatagtatagtagttaagggtatataatgttgtacgttgtaatcttgagactcttctgggaggttcaaaggattccgatgactcattttgtaaactctcttcacgttctctcttcactggtgattcaaccttcccactcttcgccttaacatcagattttaccgtatctgtcttcacattaacatcggattttaccgtatctacctttaaggtactatcagactttagagtggtatcacctttgacggtattcatggtactattatgattagtgttctcagtgttaagtttgagtaaatcatcctcgtgtactgagtcggtagaattattactggagttacttgtaatgtctgaggagatggcgatttctctgagaacttcgttgatgagtgagctgacttcctgggctctggtgtccatgtactctctcggtgtattaaagtaatccgataacttcttacgcacgccaccagcagtcaaatccgataaattgtcactcctcactatctttctacaattaaccaaattaatcaaataaattaatttaaatataataaataataagaattgataagttttaccgtatagcgttgtgtaaatcatgtttggaaatattattgaaggaatcttcttgcattaatcaagtaaataaaaaaaataattatataaaattgtagggaattttaaaaagtgtctagtcagatttttcaaataaattttaaataaatttcagatattttagttattttattagattttcaaagatcttgaatttttattaattattctaccgaatgtgctgagaattttgaaattgtgtaaaaattcatgaaatcacaaaatcaaccaaaattcccaaaatttcctccaaaacccccaaaaaacacattaaaaataaaataattataataatgaataaatttacttgaaaaaattaatggttgtgaagtatgtgtttgatattgttgatggagcagtttgggcattgttgtgagtttaattctgttttaaccctgtgaataatattaatgagagagtttgtgagattgtttgggattggttggttgagttcgtttttatgtttcaggatccagatgttatgaaacgagtgttccgccgcctctttgcacctgtgcgctagcattttcgccgtgtcaaactgtagatccgatgtgttgaatcttttcttggtgtaattacccctggcgtcaaagtaacagcaacaccactgatgcccaaactggtcatcaaatgtgatgtgaactttacataaaaaacggaatggctcagccagtatcaaattactctccaactcctcgtcataacaaatgtcaaaatttcttattaactcgtcctggtcagtttccagtgtgtatgtgtcgtcttcggcatacagttccagcggtatcggcaactgtaaactacaatacttcatatcaaatattaagtcactcccattcgtcaatggagtttcagtaggagtgttctcaggggtagagcccggagtagctctagggcttgagtccggagtagtttcaggggtagtgtcagattctgtaccattgaaatagtttacattttgtgtataatttattttacgtattttatttattttagggttatttgtgtgatttagtttcctcttttccatgccatcagtaccctcagtatattcgggatccatgccctcagaatcactaaactcagtaatattatgcgtgttaaggtaggagagaatatgattaacgatgtcagagggtgtttttctgtatttggtggagtatttgttgtacaattgtagacaagaaaagctctcccagttcaccttcatagaataaaatcctcgtcaaaatcactaaattcccagatttttcataatttaatcgtaaaatattgagaaaaaagcaattgaatttgtgtgacaagtggaaattaccaaatcctcaacagtatcaagtgagattaaaaatatcctcaaaattttctaacagagaaaaataatttttaaagtaaaataatgaaataaattgagaaaaaaaggaaaaactaaaatataaaatcagttgtgaataaagatgtcaattgtgagataatgagaagggtggaaaagaagtcaagatcagggtttgagggagcgaaaagtggaatttttagaacaagtaaaaagtggataaaaggcaattgtatacaacgtgattatataaacaaagtgtaaaaatatgacaaatgatgttaaaataatgtgaaggataatgttattgagaaaacagtgtgatagtgagaattttttagacgtaccacataatcaacacttaactcctgttatactccgatttacctttgaattattatcacactacgttaatttataccagatcagctggaatttcaaaagccacagctgaatttagccgcaaagcaccgctaaaccttcccacatcactattactccaactacccgtttatcgccaaatttttcaattttttaattttttaaaattttcactatattttatcttcctaaatctgttacatttatgcatactcagccacagtctcacatacacattaccagacaaatttactcacccctagaaattcatacagtataattatataacaatattattatataatttggataaaatattaatagtgtgattttgtgtcagattattactttctggcgccgctcctgcgtctgcggagccagtagttaaggtacactggaccttcgtaaatcaacggaggtctcgataaattcaccgcccgcaaccttaactttttcaagttattttttaccgttaactctcgcaacttttgattcctcagctccagcgcagactcgatcaaatttcgagatatttcaaccgaattctcagataatttacaggaatttgacgtagaaaattgatttacagaggttaatttagaattgttagatgaggaattggtagtagtaagggtcagtccagggattgctgagttaagagttaaatggtgtgagctggtgtgtttaaattttattattttgttcattaacatttaaatcattttaatattatttaaattattttattattttaatagtgtcagtgttggtgttgatgagagtaggatgcggaagtagtgttttcggttagattccaacaactctcaaaccaattaaaataactttaaaaaataatttatcatattgtagataattaatttaataattgaaattaatattttgataattctgtggaaaaaatgaaatttaccaagttgggtataattagttggatttaatggctgaggggcttggttctcaggtttttgagggtatttctccagattttatacctttggattctgagtactctgcaaccgtacattccagtgccaggcataagactcagaaagagcttgagaaggaggaaattctccggaaactacagggtctagtatctggagatcgtttgttcttcaaaaaatcaaccttaggacaacaagtttcaaacccggaaatcccaaccacaaatgactttgtagagtcaaaactagtctactggatctacgataaaatgtcaatttacctcctaatcaacattgatccttacgggaaattaagattcacatacggtgacttgtaccaaatggcagtctcacatgatttattcttccacaagctggagaccagatttgtcaagaacatcaaatcagatcattccacgggatataaacgtgtggacacagtgaaatcacagttgaatttggatacaattgacattctgagacctgaatctgagaaaaaatcgataaattatgacattaagagtaggccaactcctgccggcgttgagtcattttgcaagtgcaaattcagtaataaaactgatttcattaaaaaactacgcctactaatcaaaacttcaaagagtaaattcatggacaaaactgcagaaatgaaggagctgaggctaataacttcacaaaatattagaacctatgaattggagatagttggatacataatggacgagaatccgtggaattatagtacaaatccctgggaagagcctgaggatggaaagaagatggaaattgtggaaatgtacaaaaaagccgtaaatgatccgacatataaagatttataccggcaatggctcagtaaatgcaaacttttaattaaccaaacgggaacatctatccagaaaattaaataatttaatctcacaaattattcaataaattatataataaacaatttaaccatataaataaattaatcatataaataatttaataaataatttaattgcacaaatgtctgaaattttaaaaaatggtaattggtggtagattggatgatgcgggtgaaaaaagaatcattggtgactgaaagtgcatatttagtgttggaatgagtctagagcgtgaatagagtagtggtttaaaataataacgagtgcgaaataataaattttaattttaaatgtgatatgggttaaaattagattccctctaatatgaaataaaaatagatccacctttacgacaccataaataatattttaattatataaaagtattttaagggggtaattgctcatgtttttttattatttttttcattaaacttgccgcatattcagttatatcaaccatttgtctcatttctgcataatatattaactcgctttataccggaacttttattcactttattcactctggcatgcttgactttttaaatctccttttaaacttctgagataattatttttatatgaaccgtgtgactgtgaagtggttggaaaagaagattaatgagaaaaaagagtagaatgaactgttatagaaaggatgaacgatacaacttttgtaacaatgacaacctcccagaaatcaacaattttacagaaattaattttccacaacttaacaacattacagatctcaaattttttaatgaacttaaccttgatgaaattaataactttactaaaaatattaataaaaatattaccgaaaattacacagaaaacactagagaaattactacagataaaattacagaaaccattggagaacccagcgttagaagtatggatagccgagggatagagagagtaaattatatgaatatggagaaaaaatttaagccggacaggtgtgtgtgtttggacatataccaccgagaaatcggaccggagagttatgaacaatacaaggagaatgaaaccttggtgactacgtttaaacaagactgcgctaaaataaaatatgaaggttatgtactttttgacgtgcttttgacgccaggatttggactggtgaatcaaatgatatttaacggctacgacagtaaaattgagctaatttctggcacagacagaattataattaactgtattggagctcagttgaccctgtctagacctggaactaacggtagcttaatcccactgagaccttcatcgtacgaaatgataaaatgtgaaggtgacagatcacttacgacactgactgggaaggaaatttgtacccatgtagcgttaaacggagtgcctaaatggcgaggtaccgttgacggtccgaagttaatcagtatcttcaatgaccaagtgaacccaatgttaattttaagattcccaaagtgctttttactcattacattacctgatgaaagtcttagttacacgattcctataccgccgattagagcattctatgactttaatggccaggaaacagtgataccagatgaagttattgagctgaaagtctcggataaaaatagcatctcattcacttttgacaggaaaatcacaattaaaaaggttaaattatcgaactttaaactcttatccgatgagtctgacgggtttaaaattaaatctgtagaatatcacgacattgacaaaaagttaatttaccgcactgaaaaagaagctatcacacattacctcaccgagggacataagaatttaatcaccaagctaagcgaaaaagaatgttcaatagttcttgaaggagttatcagacgataatcccattaatatccgataaaattaatgaagttattagtgggataattaaaagtttataacttgttatgataagattaagggtcaaattgatcaaatttagtggtagtacgagtataaaattatacggttagtggattgttaaaatttgttggaaagtatcgttacgacaccgtctgaggaaccacatgcaattatctaaaccactgttaccaagttaatttaattgtaattatgttggaactgagtagaaataccttgagatctggtgaacaaccaagtgaagtgatgttgtaaagctcatttgggattttgccaaggtattctccaccaagcgaaaagattaaaattgagtacttgtaaattctaagcgtttcatcttgaatacgaaacctaattaatctgttaaacatgaaaaaacctgtaaaatctgttaaacacacggaaacccctgtggaatgttgaacacgcaaaaacctgtttaaatggttcaaaattgagatttttcttggcgaaaatggataaatcagtttaggcgaatttaaaggcgtggattcactgttgctttcaacacgtgtaagcgtatcaggatcaaggcattttatacaaaacatatccgacattatagaatgacaacataaatccggattctccactcctaagcgacgttcaacacaattaacatagttgaattgttgtaatgagtaggagggtcgagtgtacctggaacgttgattgatgtggtttgagttagctgagtgggagaaagttgccagaattcaatggagttggaggagatggtgaagaaccttcgagtatactaaaattcaatataaccctcggaatcaaggcttacattgatttcataagacttggtattcggaggcacatacggcgcctagacataaataaatcagtttgtggttacgtcgaagaatacaaatccccgaggcttgaaataaatcgtgtttagtccaacggtcttcttatttctcaagatgtcaatcacactaaacaactgaccctcctgctttatctataaaaatttcatacaatgatgtatgatcgccaacattgttggcactatttatactgtttagactgttaacagagtttacagttgatacagtagtactgttaacgctgttaacagggtgactgggtagataataccaagatttgtgagacgagtagttcgagaaactgcagaggttttttgggtataatattaattatactgtcaatctgaagaataaataaaggtatcgcgggaaccaatttggcaccgttttcaatgtcgaagagacttaatgaaatgtaatcatcgttaggttgatctaacatgaccaaaagtccatctgatactcttgaaatcttttaaaaaaattatatttaatttaccgtatctctgaaatatacaattatttatcatcattaccttgacgctctcttccctttatctcatataaatacgtatacgttatcatgtcctataattacatagttagtaacagtcagtacagcattcgttacccaaaatttatatgtattattagttaaatccgctgccgctatcctcttattattctctatacccttatacacactatactataactaagtaatatacagtagtgtgtataacagtatatacaagcgagtatatgcgtagtggtattaggaaccgcagaattcaaagtatgctggatgacttagtattacttgttcgaaattaaagctaaaagtgggactcttaatcttcccctcattcaaacactataacgtatttattgagtttatttgaaggtgaataaattattacgtggcagtaaatgactttacattgcaaatgtgagggaagtgacgaataagcaattattaatgtgtcattcttcttattatacactatggtatgtacacctacgtaatctcttagtcacctaatatagcaatagtactgcgtaaataggtgtaattggaacatgggaagtgtatagagttgatgtgtggattcaattcacattttaatactccggaaatcttttaaaatattttttaaattattactaccaaattaaaagccctcgctagaccagatttcatcctaaaattgattaaatttatgggtaaagtgatagtagcataagtaaattaagtaattatgtgattggaacaggactgcgacaatttcatcagcgaatattatctccttaacttcactaatctcacgacagtatattggataattggccggtaactcctccaacactctcaaatccactttctacacacaaattcagtggaatatatcatttataaatatgaaatctggtgttagatgtaggaacgtgatatggtttgtggtttagaaatcttggcaagatgttgttactgctgtttcggatctcaattgaaggaggaatctcatcgccaaatatcttacgattatacacatacgaatacattataacaaatataataataatattcaatggtataataagaatgaataaatgtgtaggaaaatgtgtaagaaaaaggaagaaatgaatgaatttttagaggaatttttcaagtaaacatgaaaccaaatttcttttttatttcataaattcaaataaatttataaaattttaatattattaggaataagattacccaactacacttgaccaaataataaattgtattaaaatgactcttataatatgtgatgaaattaaaatttgtaatatattttttattaatttttaatggagttgaaggtttaaacttttttaattttaattttaactatggaatccaaccgacacacaactacaacaaacatcgcaataacaaacaaaataaacacaataaaaataataaaattagtaaatatttgagtaaaaatgttaataatgtttataattggaaaaatgggttaaagggtctgggttacatttcgacgactctgaagggtataaacttggggtataaaactgacagtgtaaatgctccagaccgtgtgatgatagttgatggcacgggtttggcttacaggtgtttctttgctctgccagatttgaagacttctaagggcactgacatcggctgtctgatgggctttatgaattccttagctcgtcttcatcgtatgtttgaccccaaatacattggagttgtgtttgattctccaggcgcaaatgatgagaaacgtgatatctggcctgagtataagcttaacaggcaagtggtttcttattcccttagaaatcaacttggctggatcagggaattttgcgccattttaggccttccagtcttcattgaaccctctactgaagctgatgatattataacctccatgatcactttcttcagagaatattccaaatctcaacccaatgagaatgccgactcatctgtaactccaaaatccactttaaataatagtaatttacctggaactagcatgaatttccaccgtactgagacaatgcaaaaggcagtgagaggaatatttgaccggtattctcaggagctaaagggtaattcagttcaagcacttccatatagagattatcccctcaaggctgaagacaatagtgtggaaaatgataaggtttacaggggatatgacattactgtagtaactgctgataaggatttgttacaaatactgtcagaaaacgatgcaaataaagttaatgttaaaatcgtacaaccgcacaaatcatacagaattgttaaccaacacaccgtcaaacaagaatacggtactaacaatttagttaacaacaacattagttatatacctatacacttttaaatggttaatctgttaaaaattcgttaggaattgaccctgagcggtttagcgagtatttggctttggttggagatactgcggataatattccgggaattatgggaattggacccaaaacagccccaaaactaatacaaaaatatcaatctttcgatgtaaccaactctatcaaatagttattttacttctacaactactacctatgacacaattactacctacgactacagttaaatccaagttcttgtgtaggacattttaaggagtgaggagattacaaaattgagtagtaaaggtggaaagtacagagaaagtgtgaggatggctcatgagtttcacagcatagtaaagctgaaaaagaaccttagagtcctaaagtcgatggatcaactggttaaatctaatgccttaacatgccagctttctaaatttctgaaaatgttctctctacaaaaggcttcctccaaatggtcaatgttcaccaaaccctaactctaacactaatacactaaatagtgtactatatgatacgtagtaaatatactatccatataggaaatagtatgcaatatactatcaaatattatggtaagtgttaaaaattagtgtgaggtgattttaaagtatacaacgagtgtaaagagcacaatgaggaagtaaatgagcgagagcagcttgagtccggagggtggaattcggtcgtaatcgaaaaaggtgtaatcacagggcgtgtaagacgagtgtgtgatattattatatgcgtaagagtcatagaggaatttgaccaggaaagtgtacagaaagtgagggtgtctaactttactaatgattttattccttaaaatgcacaccaggcctagaattcgctcacctcgtgacttactggacataaactccttgaatatcttgaaggaagcttgacagtttttaggcgcgccaagtcccgcttccatcatcgtggcgtacatgtagctgccctttaagctgtcagactccttggaccttttggcccagaacagagcctcagaaggtagccagggcttcccactcaaaagcgcttccgccagcaataacggggtggaattctgcggtgaatacgctcctctcctactgtaatagtagtaacaaccgcctgactctgcctttccatgttcgctctcgaacattcccgtgaccacagattcgtcagtgtttgatacgtaggaattgtttggacgtggttttgtggtgcttggcgtggtgggattttgtttagttgtagtggtttggccatttgtagtactatttacggtggaatctgatataccatcttgattctcaacgtttggtggagaattggcatttttcccagccatgagtgcttcgaaaatggagacgttttggttatcgtctctgttccagagcccccttgatcgtaagtcaacttcaggatcctctggcatttcagtaactctaaccatgtttaacatcctaatttccctagtaagtctgttaacctcatttctatcctggtaagaaactctgggtgaagtgtttgtcagagtgccagtcaggttagtattggcgcccatgttacccagtgtcgagcctctagttaaactctcagactgagcgtcataaaacgtgttatccctatctgaaatattagactttgacattaagtcttgtatgatttggaagttcttaaacgtcactgggttactggcgttgctggtgtttttagcgctgaagagtgtggtgggagatgtgatgtcagggtcaagactctcagtgtaacagaacaccgaattagtcttaaagtgcttagaaagctcacggtgtgcgttagagtcacccatctcactcaggagcatattcatcagcacgtggccgatcttgtcattattattcttggccctcttggagagcactttaagagtggttgacattgtgcccatcctagcaaccctggaaaacagcttatacgcctcgttgcacctgtccagagcactggtgtactccaggtcatagccgtggagtgtgaaaactgcggagttgaaaagacctacgatattcccagactgcgcagctcttctgtagtagtaaaatgacatgaaaatgttcctcccctctggcggcgtcacgtctgtcagaatccccgcatatgcgtgtcccatcagaaccatcgaattcacgtcacctctgtctgcagactctcgtagatacctagcagccattccggaatctctaggttgacccaaaccgtgtcgatacaagtaaaaattcgcagtactaaacgcactcgaggctaaacacagcatgtggtgtgggatattgtagatttgattagcttaataggtaagttaacatctaaataggtaaattagtggtaaatttactactttaaacacctaaaacactaaactataactgaaataactaatctaaggtgatacttggtgaagaggagttgaggaccattctgaggtagcgttcggcttgaactgcagaatggcctgaatcatcagtttgaaggttagataagtgatgatgtgcaattgctaaggctgaggagggatcaccagattctgctgctcttgaccagaagttaattgcctgttggtaatttcgcctaattccagcctgttcatggcctgtgtaataaaagtcccccatcatccttagaccgtccgagtctcccatgtgcgataacttcttaataaactcggcatacctcttactcttgtactcgtcgctcgtgtcatgaaactggtcatgtttatttttcattgatgattttgcagactcaattgcatatggtatcgcctctaaacacatcattccgacattctttggtgatctgttaattgaagattgagctgacttttggcacgttctactcgggttcccaatcccactgtgaatgtaataactatacgccaaacttgacaactcatcgttcttataactgccactcaaataacacaacaacggcaagtcgtaaccacttctgtcaaccaacacatctgcatctgtgtcatttgttttccccttatcttgtgaatctcctgtgttgggtttgtcaccagaatcagactcagttttgtcactagaaactttaactttgtcggtactcttggatttactggcaatatagtcgaaattgggaatatcaacagcgtcactggaatatttgaggaatgagttgtacaaattccccgaaatcaactgatacacggtagtttcctcatcgtttttcctagtttcccaggcgtacatgttgttggagactggcgggaacccaattgacgctaggaaccctagcagagtattacaaagtccgcacggcgatgacattccactaattaaaagtgacattgacttcttaatgtgtcttggccagccgtgtggaaagttaacaactcctttactatctgacacaccaaataaatacaaaaatgccattaaacacttggctcttcctctcaataaactgttggtatttgaaggcaaacttttatactgctccaaaaccttaccgaccatagtgtcaattcttctcgaaaattttacattcgcattgttatacacatatttatacttattaactccgagaacactattaaaattctgcgggtttgagaaaatatggttgggagtgtatggagtggtttcctgtgttagtgatagtaggatatcataagcctccttaaaatctatcgagtccccagaaatgttaattagtctgttgtaaaatctattcggctcaaagagcaggtcgtcgataaatctttccgataaatctgctgaacggtctgaaactgtcctcttattatatagcgagtcgtttttgaagttccaatacactttatactttgagcccgactcgaataatatctcctcggcctcttcgtctagtagaattccgtcatatttattagtcaggagcctcgagttattaatcatattcctcaattttttaacggagggtgagtataaagttgtcttgtataactttatcctatccctctggattgacgaaatatcaatattatgagacttcatcatgtttcgagtcgctttatataatatttttatcaggactctggccaccatcttcgcctcctctctcatcgcgtgctccatactcaaccctccaacccaatgggacactctatatctatcatcaaactcatcaggtgaagacgtagtatgtgcagagatatttttataggctgtagcgttatcacgtgacgagttgttatcatgtgaggggttactgttgtcatgtggtgaatcaggagaataatttactgagttgttatggtatggttgagatttgatcttatcaacatcaaggtgaattgcatcaggatcaacactagtgttgtaattgttttgaaggtttgctggactggtggttgaaaaatgactagtaaaaactgtgtcaactgggtttttaaagctagttactccattattaaggttataaactgtgtgagtaatatcttgtacggtgaaattatcatctaaatcctctgcggcgtcgctttcagagttgtagagcgaattgtcaaagtccaggtcaaaaaactcctcaaggtctgaattttcattactcgtagtctgaactttgttgtacttcttgtaaagtttgttattacttaaatcattgtcctgttgagagagtttgcagaaaaacgattcagggtagttggacctgtcgtggtgactaatctcgaagtcaaattcctttatcaaatagtctggaattgagatgttgtcgaagttccagtatccaagaattaggcatagatcctggaacttggtcttatcaaatgagatctggtacttgaaatagtataattcaccgtttaaaatgtaataccttgtaatatccactggatataattttactgcaaacaggttagtggcatgtttccacaaatttgtgtaggctgctctgttatccaaatatgtaggccaagtctgttcaggcctataaaggtcctttatcctacttaaagatgacacttggttcctcaaaatccgctctattatttcataggctgcaccagtttgtggcagctttaccactccctttacaaagcccagatgcctcatcaaacgttcatcctgacccagtgaaatgttatatggaggattatggagaactggcgaggatagtatgcgcaggtatacctcaatatcacgaggaagtaatatacctgcgatccttatcgaccttccattaaaggggtgtgaaaagtcaaagaacccgtactcggtaatctgcagattcgagtgtagagctatttcaaagtgagatctctcaagctcaagctgcgataactaaacatttattaaactaaatttaataaattgcataaaatatctttaaataatcattaaatatatattaatggtaaaataatgataattaatggctagaaatgggattaatatggaggataagtggaagatgagtaagaaagaaccttgttaacttcgttaatgtcgtagtattcagtgattgacggatgcgagtgacaaatgtgtgataataaaattagaaaggagtaaattaaaattttaatcattattttcaggtataatttacacgaaaactaacattattcagttgaaaaagtgattatgcgatattaaaatattgaaattaaaaacattttgatatttatttaaaattaatttacaagaaagatttaaaatagatgaataatgatttactcgaaatcacatcagtcaccacatgacttgccaagatgagcttgaaaacaaaaataattttaagaaagttcaattttttaagcaaatttttattaaaattcaatgaaattttttaaatttcgtagaataaattatttatttacaccatcaatgaatattaatcaaacacataatcttcttattatttattgatcattaaattaatatttattcctcaatatatatttaattttacttaatttaatctgatgttaatatgaattagtaaaaactgataaatagatctaaaaataggtttttgtatgttatatctgcttaactgtatacctttgctatgacgtttctattttaacgcgtatttagacaaaattattatattgacaacttggttttaaattctagaatgagactaataagcgtaccaccggcgggattcgaacccacaacctttggattagaagtccaacgcgctatccaattgcgccacggaggctcttctaaaacctctaatttgtattaaatatattttaacccgccatatcatactataatctttcttacataatattttaattattattactttggttgtattttaatttattgtatgttaaattgaggagatgttaaattccgtatatcctacaaaaaagaatatccgtctccctccggaagttagtagaattctttatttaaggtttgttttaatatttaatatattttcaggaaccttccatataaaataacatctgaagagttatatgatatctttgggaaatacggctccgttcgccaaatcaggaagtgagttccattataataatttaatatttaggggtaacagtgctacaacgaagggtacagcgtttgtagtttacgatgatatatttgatgctaaaaatgccctagaccatttatcaggatttaacgttgccgggaggtaagatcaactatgtataatatgtttaggtatttggtagttttatattataatccggcaaaagcaaataagagaaaggatttggataaacaggaagctgacttaagaaaaataagaacagcaatgaaccaaaataactaaattttatcgcagctaatataatttaatttatcatttttatattttaaagattattagagggatgggattatctctttttctttattttttgagtaattggatgattggcaatatgaccgcctttcatagtataaggattagcttcaacgattctgaaaatacgatataccacattcccaaccatcatcttattatacccgtgaacactcacaattaaccctaaacaagattaattgagttagagtgtgtaggtaccagttctgtcaacgtctaccctaacgtatttagagtacatagtacaaattctagtagcatcaatgcactttgaacctacacctaatctgaacattaagttaggaaattctggttcaaaatatgcctttacacctcttccatggaggagaacttgacctacaaaacctctagtctgttctgatacacaggactcaatagtcctcgtacaggttaaattcttctctatatttgatacaaagcataaatccttcttcacctcatctccgtcctttattaacatttgatagtatccagtgttactcttctgggtatccctaaataatattgtaaaatttgtattagtacctgaaaaaataattcgccctaagagacctgatattaccaggccatctagctacatgtaggcggggatttaagcttatagaaggtttgggtttctcagttggtaatttgactagtcttgagttggtggctgtgttttgaacgccgtaaatactagctccgtaacttccagaaacgccgtaattgcgataatatttattaaataaatgtttacaaagtaaatcatttgatatttcaaccctggatcttattccagataatattaatgtgttcattgccaaaagtgttaaattccatgaaatttatagatattctacaaaaataaaaatcaattgagaaataaatataaaatgtatataaatgaaattaaaataaatttaaaaaataaatgttttagtatataattagacaaattaacctgattagtatttgcaacaaatcatgtaaactcattatgataattattttgattgagcgaattatattatataattttatttaagtgtacttattaatatttctagtaatcttctgtttatttttattatttcagagtagttttagacttttcttgttttttcagtttaaaactcgtattttaaatataaatctttttttttactgattttttaatttttctcagactatggagtaatttagtttccaaatgtgtaatggaatattgtaaaaaacaatgtaaatatagaccttccatgacttataagatgagtttatttaaatttggttgtggtagcgtagtttaatggatatctcgccaattgtagtttcagatgatgaagaatcccaaacaccaccaaagaatcttaacaacttagtgaatgggacgagtaaggattttgatcgtttggattccgattacagcccagctcccaagtttttattaattgacaaatcctcagggaaggatataaaaaaagggcaaaaaactcggaaaaaacgttacaccgcaagcaaggactttctagactcgataccgttttgggtgaattcaccaaaggatgtaagagacataccctcacatataaaaatgatatgtgaaagactaatacatgtagaaaaacaaattaaaaaattctgcgtagagcgccaggggctgctatcaacactctggaagctcggaggggatggctatattaacctattcccagacccagttttaaaatcgctaactttttacggcgttagtaatagcccggaagagaatgatatatataaagatgaaatggagattcaaaactcggaaattgaggataagttagattacaacaatttgtattcaacgaaactagaaaacggggatcttaaaatgtggaaatccacctggatgactaatgagtcagagccgtcgccagttgaaactccaacccaaactccaactcaaatcccaacgattaaaacttttgtgtcaaattatattagatcctgtggttcctcaagtgatttcgggataaccacgggaatgaatgagagcaagaagagtggctacagtaacgagtcaaatgaatccagatgttctgatgattatgatagagaaccgattgagtttttcaaaaatctcgacttctcaaagttaaatgaatcagatttggaggcatggaggaaatttttcggactcaaagtttaccctcacacagttacacatataaatcattattatataattatatacttaaattaataatttgtttctattgtttaatgaaaaataatgtagaaaatgtcggattcggatatggttagggagttggttaaaattcgggaacacttgttgtcgtttattaatgtgtgattccaccccctcgagattccaacaaatattttttcagtttcaattgttgttgattctgattctctaaaatgtttatattatgttaattttatcggttctattcatatatgttacagtagcatcaaactcactctgtgtatatttaaaccaaaatgcaagttgtaaaaatagcttaaatcaggattataataaacagaattacacatttctaaacccgttaaatataataaagtcctgggggacttttaaaggaaaagatgaacgtaaagttgattatgacgacgatcagatatccagaacaataaatttaccgaggaatgtttggccttctttcccagacgtcaacgaggcgggaattgaacggcaagaaagagtacaaaaatactgggaggaacgaaatgtgtactctaaattgtttgaagaacggttgttgcgtattttaaaaaaatcgaagaagtataaatttttgagaaatcaatttaaaattatatatgatgggcctccgtatgcaaatggagttccacatttgggccatttcctgaacaaaaccataaaagatgtgttcttaaggtttttcttgctaaaaggacgtttgcccataatgatcccaggctgggattgccatggaatgccaatagagcataaaattttaaaaatgtacaatactgatgataatttagatagaattaacaccgagttgattccaaatttaagggccaaggaggaggagccggaccctgaaatccacgagattttcaagtccgttgaacacccgctcttcactcccgaaggtttaaagtatgtaaaaaagtatattaacaagattgaagataggtctgaggctgaagaggagcagaaacaacgagaggataaaaagaattggagtatctttgtgagagataaatgccaagaattggcctatagaagtataaaagcccaaatgacatattttaaaaacgctggaatttgggccttctgggactattactacgctacttatcactctagatttgaaaagcaggtcatgaccacattcatgaagtttttcgatagtggcctcatttacaaggccgaactgccacagatttacagtagtaaaagtaagtcagtgttggcagattctgaagtgattcagaagactaaaagagtcctaacctcgttcataacatttaatgtggatttaaactcctgtacaagaggagttttaaggaaccttaaggaaaagatggaagagttgggcttgaaagacttgaagttagtagcctggactactaccagttatacgattccaggtaataaaggattagctgtagattcaaaaggagattaccatttatacagaaaaggtaattcactgtacataatgaatgatttaccaactaactcaacagagcctttttggtcagaatttaagccaatacgggacttaaatcagttaaatccgacaactgagccaaaagaaactcaattaaacaaatccacagaatcaaatggagttaattcgaaggaatttataattgatggttacgacttgggtagtttagagtattttgacccagtctacggtcacaagtttaatgtatattacggtagttatgtggactttaaaaaagggactgggatagtccatttaagcccggcacatggttttgatgattataacacaattaggagagatgataggtttgtttcaataaagagtaacactggtttcaatttctgtaacctgtttgacaaggacgagaatttttacccagatatccacttcggactaataggaatgaacataagagatttcaacgagaataccttggcagagttagtgggagataatttgctaaagtatgaatataaggatatagatgtggatgtggattggaggtgtgagaatctagttcacacaagactgacaaaccagtattcactatcactgcctcagagagaagagattttacaactgttaaacagcgttagaataacacccggttccgcgcgtaaatatttaaataatataataagggcaaggaatagagactggtgtctgtcgaggcagaggtactggggagcaccaataccatatgaaaataatgaatgtttgatgttgcaaacatcacctgaggagggtttatctcagaaggtttggaagaagtcagaggatattttaaacaccatggatgtctggttcgagtcagcaatggttagcgagcatacaattgacgaggcgatgtacatcattagccaaattcttaaaatgagccgatacaaatttagtattagtgttgatgatcttcttaagaaaattaaaatcgaagatgtgctcagaaattcgcaaaaatacgtaattgaagggcaggaccaaaacagaggctggttccaagcacttttaatcgttagcatgttgacaaatacagctgaaaagttatctaaaactagtgaatttgaccaaagaactaacaggataattaataatggtaagcctgtggaaaaggaaatcgcaccctttgataatttgtttacacatttctttgttaaactaaaggatcaaaaacttagtaaatcgaaacagtcttctcagctcgatcaaaatgttgataaggctttaaatggaaccaaggaattagtgccggttaataaggacattgatgttctatattatggatataagccaggagctggtgataataaaatcaaccttgaatttaatcaaattaaagagaagattaagccgggatatgatataccacagttactcgagccatctactactagttctgataccttgagtagtaaaggaattgaagaattagatcgggaaagtaatatgtatatgaatgtagatttattgcgtacattagtttgtaataatgacttctttagtcacgatttggagctgtccgttgattcatttaagtcctcacaacaacttcaaaagaaaattgttaattgtttcaagtatattattggtgttttaacagaacctagcccttcagataactcacttgttgttgactctgtaaaagatgacacaggtaattcacaattgggccaggataaaaaaggagattggggtgtatttagtataccagaagttcgttcttctagattaaagaaatacaaattgaatggaatggatctgtactttttatcccaaggatactctttggcagagtcatcaaatgagtgttaccagaggggtcaatttttcaaagttctaggcctggttgataagtttataacttcactctccagtgtttatttatcgtacattaaaaactttttatacgtgtacgacagagaagatgagaagaataaagctatcagatttgtgctcgtgaaacttctttacatacttctgagggtcttgggaccaatagttcctcacttgtgcgaggatatttataggtcaattaaccctgaagcgctgtcactattcagaaaaggatggccaacaagacccgagtcgctcaaggatctcactgaactagttggcatagcattaactgttaggaaactaatcaataaacagcatccacatgctaataactctattctaaagcttgaaaataaccaaattacagaaatcttaggtcaactagaggttccttttattcaattttcacaagtagatactcaattttttacaactagatattcaattttctacaactacatattcaattttctaccaaaatatgaatattcacacggtaatttaatttgtagaacgaacataatgtcgatttgagcttattgtttaacgtggctggagtagaatttgtggataagctgaagaacggtcacggcgatggagttgtgaagtatgatttggtgaattctgagtataaaaagtgtaaaaggtaaaaattattgttacacactcatctttagatgctggctgtttaaggaaagtgttggagaaaacctgctctgtaaccaatgtcaggattttttaaataattactacactaaaactaagtaatttgttacaaaattttaatggaaggataagttattcaagtaaatatgacgaattttaatacgatattaagttgttggtataacaaaattaagatgcgatggattccaatttctttctcttttggtatgagtagtacctgaaaaaattatagccctggactgaggagttgcacaagtgacagctgaagagtagaaggtttcgaggtttcaccaccagtgagaatcgcatgaacagaatactgtatatgcataaaactccagtcattttaggggaaataaactcgggattctttgtcacttcagttaaaccggcgataacaaacccccagttggcaactgggccccaaaagtgagaagacaagaagtagtttttaggcttcattatatttttatatttttacacaaatatttacacggaatttatccattaaaccgcttaatttccccatacacctctcctttacaccatcagtccagcacacgactacagaatatacacaataaatagaagaatacacataaaaatagaataaacatgagtaaataatacaaattataaattagagaatacagatgatagtataaattatacatgtgtagtatattattcaaataatttgacaaatttgaaccctccctctaggaaagacttctcaagacgaattatagagtcttcaaagccataaaatacgtaatgaaagagagagagataaattccagcggcgctgttagcgtatagagccattgacaaataaagacagaagaatatccattcgacatcgtatggtaaaacccatttcaaactcttaagtaggccgtaaacattaaataataccctcgaattgttgttataaagacgttttagccagtctggaagactgaaatagaaatctttgtgttcgttatagactagtaactttctataggtttctctgtattccaggggttccagaaggtattgtaagtcaaggaacctggaaaaattgccgtaaaagaataaataagccagatgttcagtcaacgaaaataaaaacatggagaacacaaatttagataaaaatttcgaggtttcgtggtcaaccatgaatgacccggtgttccagttacttttcatgagttcatattgtaaaagagtcatgacacctaatcttgtaactgtaaaccccttcgagaatccactcaaaagtttatacattaaacctctatccacctttgcaagattattcgtcatccagtttgtgtttgttagaaaatttgacttgtaaagtgtgcttaaaaatgctcctctcagtagcaaattgcgaaacaaaagatcaactcctgaaagaattagtccgaatttagtgtatcgttcaacgcttccctttccaatttcaccctggaatgcccatttatcccttagtttcttaaacgcatcatctgatacggcaaggtaaaaaacactacccccaattacagtgctaaaaaatgtggtcataaacaatacgcagagatctgatttacccatgactgaaggaaccagagataaccttaatgctctgaaggagtgttttagtgctcttaacattgaaggtgagggcttaaatgggcataccataagtgcggccttacgcgtaatttcatcataagccttcttataaggaccattcttcaataaactctgtgaatctccctttcctcctaagccctcaatgctttgtattcgttcattatttcctggtttatcattatctatgccactatcatcagtggtttgtgtgtcattatttattaaggtaagactcccatcattatttagtggagtgttagtaagattctcacgattggatggtgaatagtttaaatttgtgtgtatatcagtggaatcacagttgtgttgtctgtttatattaaatttatggttggtattatcaccagtgtgtgttaaaagttcctaaagttaatgttgagtaaattacatatggaatcataccgtggtgagtgacacatttttagaatttgccaatttagatgaaattgatcttgccgataataatagaagaaataacaaaggtaaccgcatattataggtctaaattacatcataaataggtgcagtaaacagtaggaatcaagtttaaaaaagtcaggatgaaaaattcttacagacgataattacaaaagtattacattatcatcagaaagaatttggtccacaataataacccagatgtgtaagatatttataccgatgtataaacaaatttttgaatatatcttttacgtatccccaccaatgataaaaacagagtgaaaacaaattaatcccctaaataagtaattttgtatattttgttaaataatttcaatatataaagggggaaatagtattgtatattattaacatcttaataaattaattttaaattaacccaaaacatacctaaatcaatcataaactatccttaaaagcacccctaaatcacaacaaattaaccttataaataactaatttttctaattgtaaattaatacttaaattgtataaaatttagcttaataaaaatgtctgctcttggtatgcctccacatttgttggtcctatttcaagctaggccgcctttacagcatgtagaccctttacctagtaagccagtaagacaaattgatggtttagctgggtttttagactcttttgatgcggaaactcctccaaaaaaagaaccatttgaaacacccagacaaagaagagataaaagaaagcgagagacgcttcttaagtataaagaggaacttaagaaaagggcttcagaatatgacccatcttatgatcctagattagcaaggggagggacctcaagttggttaacacatgacccttacaggacactttttgtggcaaatatcgcatatgatgttactgaaaaacagttatcgaaagaatttcaaacctatggtaaaattagaagagttcgtatgattcacgatcggagtaataaaccaagaggatacgcctttatagaatatgaaaatgaacgtgatatggtaactgcgtataaaagagcagatggtaaaaaaatatcaggaagacgtgtaattgttgatgttgaaagggcaagaacagtagaaggctggcttccccgcagattaggaggcggtaaaggtaaatctaggggcgcacctcccaaattttatgatggaaaacctcttgtaccagataaggagaaaaaagaatctcataaagaataatcttttatttcgtccataattttttcacttcatttattttataatttattctatcctctatagaatttgaataaactttatattatatactgtgttaatgtaattatcgtctaattttgttaatgatgataataaaaattgtataatggatttgcatcaaggaattgatgtagaacaatacttaaaaaaggaaaaaattggtataaacttaaaaaataatcaggattcatatttatatgaccttgaattggtccaaaaaattaaagcctctccaacttcttacgttttcgtatttgaatactctgaggacattcgagatgtggtagaagttgacgttttttcagcttttaggttctttggtacacacgacaaaccttcaattccaggcacctggtaactttacacaaattaacacctgttcttaggaacggcatagttttagatgaagaagatcgtcaagtaaaaaggaattatacgcccatttatatcgacgttgagaaaagattggttcattttcttattcgcatatactctccgacagattcataccccgacggagggaaattcacaagatatctggacaaatttctaccatcggaatcaatatcattcacaccctcaaaacagtaactcactattatagtataccactattatactccattacattattaaatatgataattaatttgttagaaagtacaagttgataagtgataatacaataaaagtattgagtaaaaaggttgaatttgataccctaaacatagctgctggcggtactggtataacgccctttataaggcttctgaattactaccaggatttaccctttgatattcactttatatactccaacaggtcagtagaggagataatgcttaaacctctttttgataaacttgcaagcattaataaaaggtttgagattacatacttggcatcaagaggagtatcatctgaggacgtaactattagtagaataacagaggaaatcgtgtctaaaaagtttgctaacactgagaaggccttgtgtttattttgcggtcctccaggatttaacgatttgttatttgacatcttgactaatcttaaatttaaaaatatttacagattttgataccactgaacccatgagtgatggtctgaataaattcattgccaaggcaatagttttatcgaaattggtaaaactaaggctgtcacagcccatgctcaaggggagtgtggaagactcaaacaagagtcttagcgtctccataaaagcagtttctttcctttctaaaattgttccaattttgaagttatcgcaagcactttcaaacaagtccttgatatcctcaaccgtatcaaagggctctaaaaagataggaacagtacgattacacaacaaggaggaacagatttggcgtgttttaaggcctgggtatgaaaaacaaactaaacacctaagatggagaaaatgacccattaaaccatatactaaatgtagttacatcttaaatatacaataaatacatataataaatatttatatgctaatataagatattagtcatttctaagtacaagttcccaaagtcgtacatttccgtaaattaagagagctacctccttcatcatagtccttacattcttcttagtcaggcatgaaatgcgataaaaaggtatgcttttactctgagtgtaagtttcagcatgagaaaaaatctcattgtccgactgcaccaagtcgattttattagccacgagagccactacaggttgatgaagcccggtggtttggttcctactcagcaaaagctcagttattgtgatggcgtggtagtacgattcaacagaagttacgtcaaataaaaccagaaatgacattctcctctggcctattggggaataactgtcaccctcaacaaatggcgactttggagcatcataaaatgcaaatggaatataattttgagaatcatcaaaatattcatctaaaccaaattatttaagttatttattggttaataactagaatgatggagtaaatgggtgtgttacatcgaatactgcgaatatccgtgaaatggagcaggtcgaaatcggtagtggtgtcctcgatttcgaaacaaaatgtcttcgtctcatcatgtgaaccttcaaaatccgctccagaagatagcttatgtacataatagtataacctaacacaatagataattgagtataagtttaataggctaatatatagttaaatgtatgtataaatgtgtactcgggtaaatgtgtatgtttataaactgaaggtaaaacgttatttacaagtgaatttgccaggaatgttttcccgctgtgtacaggtcccaaaagacttagtctgaatagaggaatttcaagattatcaactataacttgaggcattctatatggtacattagaataataaaataaaattaaacaaaaacgttaaaaataaaattttaattttaaaaataaatttaaagccattctataacagaaagaagaaaataaatgtgttaattctgaagttccgttccagcattagtagttcgtggagttcatgacattaattgggtaattattctgataggaaaattcttctgaccactatttgtgtttaattttagaattttttattatgtaaaatattactgttgatttatattaataaaatgatttattttgactttgaaccttaatataacagtctttaagtaaaatcgtttacaactgtctcagtttaataatttatagtacagattgagaatggatgagctagtggatgaattagaaaacgttatagaagaagattcaagtaatgttggatcagtggaggacggtaacaaggcttctggaagttataccaactctcaactcgaggatgacctcgaaggctcaatagctggagctaacactaacctgagtgattttactgaagctagtggctccaatttggataattacaataagccagaaccgacaaaaccgagtgaaactttaaatggtacagaagtgaaatttgaggattctaaatcctttggtaagaaaggtgttgaagttggccgtattctggccagacgtggattattttcctcagatgttctcaatgaggagactttgtttacaggaagtaccagagcacatgactatcaaaggacacgtcgttatcaagctgctgatactaatgtgaaggacttaaatgacccaggccttaacgacaagagttgtgttttacgtttgccggagtatgctgcagatttggttaaggaaagactagcaaaaagtgagcctttggggattacagtaacccctactggaaggtatgatttcagagaatacaaagttgagataaaaggcctaataacacctttatttgcaattctgggtgaacttccgtgtgttattgaggctcacaagacgcttaataatgacttattgttcaagtcagctgatatttcacaactgatgatcgcatatgagaaggatcaggctgagaaggtggctgagattttaaaggatagaatgtgggagtggccagacggcttaactccaggtacaaaaaacattagaaagaggagatttaaaaactacgacgattattcaaatgaggagataaaggaagctgaaagggagtcgttgatcctaatgaacggtttagtgagagatacataccactttgagattaaaactactcaggatgtcaatgacctcgtcgccagttatagagctggaaatattaaggaaagagttattggaccagatgaggacgttgcagtgtatataaaagctctagaggaacaggaaaatgaagagtttcccgatttatctgaaatcatgttcgactccgacatcggcaacataccaaacaaattcatttacaataacattaaaaacaggattttcaacaaccctatttaatcttactacaatattacaagagtttaataaacaaatttaatcttactacaatattatatacaatttgtcatgtatattaatcgtaaatttcagtatctcggaagcttggagttataagctgaacgaaagatgcgataatgaaggggaagagcagaggaaacacgtttgaaaagataaagtaaaaagtacgtataagccttaatgtagagcttctgctggacctaacgaaagttatgcagcctaaaatttgattataaagtccttaaagcgtgtagataaactaataatttaactaatctgtatgtattaattagagtgtataggagtaaaataaaaaatacgtgaatatctcgagcagagttttaatccgacttccaaaaaaggtcttcctaaagttataaataattgaattctgaaacatacccaaaattagccttataatggataaaactaggagagttccatagattataaagattcttagtctgtattcaggtacgatatatgactataaaagaaatcttgagaaaataaaaaacttacgtcaagaattctggagattttgttaaaaatacgatcaaatgaaaaattctccattaatgtataaaccaaataatcatttttaagtagaataatttaaattttttaaatttaaaaataaaactaatatgcattgtgacttatgagtatgtagggaacgcaactgagtgaattttgttataaagtattttttgtatttttaaataacattagccaattatatgaatgtaagtttagttatgtgtagacttctaaactcatttaatttctaacttacaggttgccgtggaaggttgctgtcacggtgaactcgataaaatctatgaaagaatcagaagctatgaactaaaaaacagtactaaagtggacattctactttgttgcggtgattttcaagcaataaggcacgaagatgatttgagtgagttatcatgtcctcctaagtatagagactatcgcgattttaaggattattataacggcctaaaagtttctcctgtattaacagtttttatcggcggcaatcatgaagctcctgactttttaagaaatttgttagtccctaataccatcttattcatccacacaccttaaaactttatttcttttattttacttaataccattaattaaacgttaatttacatatttatatagttctaatagtctatttacacaatattaagcataaaatcctgaatatttcttaattttagttcagatatttcggaggatgggtggctccgaatatatactacttgggccattcaggagtattaaacttcggtgggttaagaatctcaggtatttcaggcatttataacctgaatgattacactaaaggtattttatacttaaacattttttgaaggctactttgagtcaaggccttatactgagcagaccaagagatcctcatatcatataagggaatttgatgtgaagaaattaagcttggtttgttatttttctttatactgttatctattctatgattgtgtggataaaatattgattagataaaagataaagttgatattttcctatctcacgactggcctgccggtattgagaattctggaaacttggaccagttactaagaataaagccattcttttatgaagatataaagaataatactttgggaaatccaaagtctagagaactaatggagaaaataaagccaaaattttggttctcagctcacttacatgtaaaatacgaggctgaatataaacatgaagatggaagtactactcaatttttagcgctggataaggttcttccatatagagaatttttaagaattattcaaattactcctgatgattcgtcaaataagaggaagttagatgaaacatctgaacccgttgaagatacactgaagctttgttatgatagggaatggtgtgcaattcttgtggcaaatagagataaaatgcctctgaaccaattttcatccgtcaacccaatcactctcaagtattcacatacttaactatggtgtatagttaaccaaactatagatataacgagccctgtgtaaatatattagtgttaatggtagtttagtgagcctttggatgaggattataaatttgtggaccagaggttcagtgagtctggttacgaaactgtaacgcaggatggaaagactttgtttgttatccctttcaaggctgactctcataaggaacctgaatcgcagagggaggcctttatgaatctcttgaagctccctactaataactactttagccctggaactcatgataaaatgactgtgaactttgttgaatgattttattaatttacacaaataataaacttaatattaaataggctaaagttgaataatattaatattgtttaaaatggctggaaattagagttgaaagaagtttaatagtacataattcatcaatatcagaaagctcagtggtatcaggttctttagacttaatcattgacgatctcctgagaagagatcttctaattctctgaagatcatatgaaacgttttcagtcatggagtggagttcatctagtattagtaatataataaaaagccatttggctctgtttctgagtaggggactgcctggaaactgacatatcaaatctcccaaagtgtgtaaacaatcttccgtgcaggcgtaattaatcccatcattgcacagagttaaaatcgtaggaggttctgagtccattaaactcttccacatcatagcttcatcttccctatttaaattcaaacttcttacattacaagtgtgagtagtattggtgtttatagaggcagaactgtgatcagagtttggaagatcgtgggtgtggttgataaaataagttctggcgtaattataaattgaagaagacaatttatcattttgtattccataaatcgatgcgatgtttgattttaataatttaaaatacttaagttcatcctcagtgagtctaaaacctgaatctagtttttgatattcctcatcaatgtgaattagcctgttaaatagctttgttgccttggaatcttctgctaaatcaccttcacatgggtcggattttttcagttttggtgtatcaacaacaacgactttgggaagagagtcgttttcaagttttacctggtttaaataagtattaacatccattttagtgtggaatcacagagggagtgacatgattgtaaaattttcaggtataatacacctgtatacacagttgtatctattaaatacaacagtatgtataaatttttatgtataaaataattttgtttaagaatcgggaaaagaaggttaattaatcagatacattaataacaatttactcatgcccccacctaaaattatttattttttataataatgatcatcatctagcttcgtttttgttcttgttaaatttcttgtattttaggtttttatattttttaaaatgttgatgttacttgagaccccagccggctacggcctgtttaaattaacaaacgataaaatgctagaatgcaacgcggacgaggtttataaatactttgaagactccgataccgcaaaatcatcgtatgcttccttacatatattatcttaaacagttattgaccaaattatatgccgtaaattcaattattatacatacaattttattagttattagcatcagttaataattgttcagtgtatgtttgaagtcatttatgaagtttaagaacagcgaagatgctgtgaaagaggcaaactgcctgatagaatccagactgggaaaaggactccgtaaatttctaaccaaaaatattctgaacaaatctttgactgacgatttggcgatttgtgacaaggctttggggatggaaattcagaaaaacctgaacataaacgtctgctttaaccagaagactagtgagataatcagaggacttcgtatgcagtttcatgagcttgtaagtgggctttcagaagaggacacaaggtcaatggcacttagtttatcgcattctctgaccagatttaagctaaaattcagccctgacaaggtcgatgtcatgatagtgcaagctataggcctgttagatgaccttgatcgtgaggttaacaagttcggaatgaggcttaaggagtggtatggatggcactttccagagcttgacaagattgtgtcagataacctcttgtacgccagagtaataaaacgcataggaatgcgtgaaaatgctaaaaacgctaacctctctgatatactccctgaagacgtttgtaaagagattgtacaggcctctgaaatttcaatgggaagtgagatatttaaggacgatttggagtcgattacagaactcgcatcaagacttgaggagcttctggagtacaggcaaactttggaagagtacctcaagtatcgcatgaacgtgattgcaccgaatcttacttacatggtcggtgagcttattgccgccaggctcctatcacacagtggttccctgatgaatctagctaaacatcctgcctctacagtccagattcttggtgctgagaaggcgctgttcagagcccttaaaacaaggtctcacacacctaaatacggtataatataccacgctggactcgtaggacagtcgtcgccaaagcataagggtaaaatctccagaattctggcggctaagctcgctctctgtgtcagggtcgacgcgcttggagaatctgacaagcccacagtcgcgcttgaaaataaaaaatacgttgaaaataaattagtacagttactttccgatggaaatcaaaaacgtaaactttttaagccaacaatcaacaccgataagaaaagattaaaacaataatctttttgactctttacatggttttttctcaatttttcacattatttacactaattatgaataatttatcctataaataatgtttatttgggtgtattcacggtaattagggcacgattgacccctgattcaactgcaaaggtaacgtgtatcacgaacttatgtaaacttggcacttaatagtattaatataaataactctacagatgtgataagtagtgtgtaatgtgtattgatagaatattaaggggaggataagctcaggagcgtcattaagctgagcgccaggagcttaggagcggtcatgaaggagctctttgcacctttttgtttttgtccttgagtagcttctccttcggagtcggagccactgtcttgaacgagaggtttcttttcaccaggactgctttcagcttgtccagcgaatgcaaaggctacaaagcctgctagcaaaaaaagtaagagggagcggatgaacattttcaggacgagtaaaagcagagaaccaaagtcttaacaaatacttagtgaatgatgatggggacgcaataatagagcgtgtaatgttgggcattgccatcccgtgtgcagggagatgctaggcatgatgcaattacattgattacatttgtgattaataggttctgaatatgtgtttttggcctatgctgggcctaattttggctaattttgactcaattttgtgaaatcccacctccaaattcgacgcaaagtcttctgtgatggtttcctgtgtctaaaaccaacccttaatccatcaataatctgccatggcaaaataatcgaatgatcgaaaaaatggcccatttgccaagtttttacatttttttaacgttttcagaagtttatgatgctatcgagtgtcattaatctgccgtgaattcgaggtttctcccagtgtttttttcagattcttggcccatttggtgagacaaacctgaacaaaaaaatataacatgactgaataaagttacataagaaatgcttgaaaaaatcaacaaacgaatttgaattagctagctgaatcggccgttacctgcgggatgagtgaagtggcgaaattttacttttttccatctctgcattcttttaatcaataaagtaattttattcacattttcagtgaaatttcaaaatttcaggccatgactgtgacaaaaagtgatatgcgttctgtcatagtgtgttgtcgtttgaaatttctagatctggggaattaaacggcacaaagttaaatttttgaacttattttcacgtgattttttatagaaacctgcaaatagatgaatcttgaattttataaggattatggccttaagtgtcagaggtttagagtatctatagtttatcttacctctagtggatattcctggaagcttttccttcagaaattttatggctgagaaactatactgcgatttcacaaattttaagagatcttcagggatagtttgaaatttaacactactttcacacaactcgaaaatttacacatttccaataacaattaattgaaaaggttattaagttaatctggataataaaaatttactgaagaatcgttaaagtacgatggggaacaagcaaggattggaacgagccaagctgtaaaagagtaaaaataatagtagcatgtagtcataggagttgatagtatattaaaccatgtagtattgttagggatacaatactccttgatgctaatacgttagtgtgtgagagtgtgtgcgtgggatcgagctttgaggttacttgaggcagaacttgacaaggaagacaacgagagatgcgacaacaacgaaaacgacaacgacaacaaccataaggacgtacttcttcttgttggtgtcctccttctcgtcagtgggagtgaggtcgaatctcttcttggagggatcctcagtgaagggcttgtaggtagcgagcctgtcctcaccaacttgagaaacgaagtcgtccatcctcttcttgaaaagcttcatgtaaccttcctcggagttctcatcaatggtgggaacgaagacctcagcccaggtgagttcaggtgtgagtctgaagtgaagtcttgtggaaacccaggcccagttgtagtacttcatcttgatgaggaagggggcgagttcacctttccagaagaccttgacgtagtggacgtagtcgcacttcatatcctgatccctgccaactctcaagagacgctcgccgaagtaaacgtgctttacattgacgtattcccagccctcttttttaaaggtgtatgccttgtatccctgcttgtcactgtcgaagtgttttacgacgagtctgtcagtggcctttgaatctttgtcgatatcaagagagagacccttttgtaaggtggcttgcccaaagataagggcggactttagcgcgtgtgtcaagaggacaaaaaagaaaaccttaaaatatttattcatgggtggataactaagagtattgaaaataaatttatgatattagtgcactgcagtgttggtgtgttaattactatggggtcaaggatttactgtttgtttggattccggctcccgagcaccctagaaaacctgccctttgacaataattcttagccctggaactcccgaacagagcaactccgcctctgcccccgacttactcagccaagtgccaaactataacaaatgtgtaagaccaaaaaaacagttggagcggaaatcgggccaaaaccagaaatttttttacgtaatttgtctccctcaaaaaacctgaaccttctgggctttatttcgtcgtcttccttgccgtagttcatgtccctgctcttctcgtgctccacaatgtccctcacctcaaacagaacgtcgtcgagaatcatccgaaggtgaccggtggttatattcttctcccagtaatatgtcctctcttcccgccattttccgctcctggtaagcacgtaggccgggtaaacccggtcctcccagccgtggtacttcttgaaccggatcatgatgggagtgttgtacttccaatacgactctatgcggtatatgtaatgtagaacaatgtcgttgccgtctattgttatggcctgattcccaagtctaacacctgagactgagaaacagtctggcctctcagtaaagaacttactgtacccctccgggcacaggacctttgtctttttgttcgtaatcatatgggtgctgctcgagtccgtggctcgccagtctatatccacagttacgtagtaacctctaactaaaactgatgcgtaaataattatgaataaaattgacgtgtaatctcgctgcatttaaattttaatttttttcactgaattttaattgcatattttacattttcgcgtacattaaattcaaatgtgtagaggaatttagccaaaattgacaatgtgatgtagtgctaacggataggtagaaaaaaatattaaattttaaatgcaaaactttaaataaaatatcttacacgctttaaaattttaaattttaagctcgattggaaatattccaaataattccatccactggaggaattttataatacaactgaattaaactctattgagccctggtttcaatgaattcattgattttctacactttaatgcatttgtgataaaatgttgatgaggaatcactgggttaaaatgacaaagagaacgggaaggaggagagaggagagaattgagtttatgtggaacgaccctatgcctgtgattggtcgatcttcgggaatctcacccaactcgtttacaatgtcagttaacacatttttaagctcagctccggagagcggtaaatgcttggattgttcctcagtcaggtcgactttggcccagactttcttgctcgtgagcttgtagtagatgaatattttattgttgacggtcctggcctgtttgaagtataaaaggacgggagtctcaaatttccagaaaacgccgattttttccactgacttagcgcacagctccttggttccagcctccagcttctttcggccaaagtagatgttggtaatgtcgaaaaggctagactgctcgtaaatatgctcagtgtagccttcaggagcaatggagacgatgtccttgttaactatatagtgtctttccctaggatttgtagcgtccttgtttatatcaattgtaacctgctcattcttctccccgccaacgccaataatccccaaaaacacaaatacacaaattaatccaacattaaagcgtatcaacatttagataaatttatataaatatataaatgtgtatgaatttgctatggggagtgaaattaattaaattagctgctattctttgaaatgttgaacctttcaagattaattgatcagtgtttatctgaaggttttaaaatttttaaaatgtgtaaataaatcgagccgatttccgacgtgggtaattgaccgacatgcaatatttttcaacaattttactcttctacattaaattatttttctcaagtgactgcgtttagttttattaagaatcgtgagtttggttgattttcacgtttatttcgggtgatacgattgaggctcaagtgctccgattaaaatcattttccaatattaaaatcattttccaatattaaaatttctgattgtattaagatcattttgcaatattaagatcattttttgaaaacgtagtacgcgaggaagccgagtagtaaaaggacgaaaatacctccaactgcggaggcgatgatgatgagtagctttttatttttctggccttcctttttatctccgtctggagtgattttgggattttgactttcagtgaatttaagtaattttttcaggccagcgccactgattttgccgttactgtttgcttcgaagtcgctctctttcacttccttccacacgccttgaattacattgtagtactcgtacttggagtgagaacgttcataatcgtacctgaagcagaaagcgagaatttggtcatcgttccagtaggaaaacacgtcgtagacgtagttccggctgatgtcggcgccgttaatcctcaagttgacgttattgtagagcacatcagtaacgttaaagtagtgcccgtgagtgtctccgaagataacaaacttcttaaaaccagctggaacatcttcattgttaggtgtgttcggtacgactttgctgggtgagtttgcagcgcttaaagttaagtccaaagtcacgttccttctcgatattgccgcagaaggcccggctgaacacctcaacaagttaatcaacaataacaaaacatatataaccttcattttattattaactctggctttgtaaaactatttaaaaattaagttaatgtgtgctggtttcactgtaaagaaagtaatattaaagatgattctagggtaattttcgaaatttacttgaaaaatattataactaacgagttttaatagaaaatattaaatttgtatatctgaatttgctgttgttatgtcttgattaatgatgtgcacctgggtttaggcctaggaagctaaagccttggtgcagggggagcactgagcccattgttaatagtaacagaaacaggcccattctcaaataataccgaaggttttaggcgctaaattggtacagcttgtttgttaaattagtttgtttttccgagattccttcacgattcaacaccataaactagcgtcaaaattatcaaaattaacccttctcccattaaaaatttttatcaatttataaaaatatttcggccatgatttagcttattttcctcccttagttagtgtgaatgagaattatattacattagttatgaaattttaaacacgtgactctaaggagttattcaaggctttttttcagcttatttagcctttcctctattaactttatcttcctaccaagggcaaatttctcagtttgctccttggaagagaccatttgagagaaatattcactgatcagattctcaacgcctttgaaatattcgttcctataaactattctagtaatttttccttacttttccttctcatttaacgacgttaaatgacttaattcgtgctttaaaatctgcttatctatcattctgtccctctttgttacacatttatcataaattatctaatcaaatttttataccattaatattaatattgtgaatattattaatattgtgaatactataaatagtgtgaatagtgtgaatagtgtgaatattgtgaatgaatatttgtggagtacgaagtgatgtttgcattttgagagtctggagaatttggggttattttcgtccttgttgtccttggccaggccctctattacgcatctgttgagcctaaagtagtcctgatcgcagagtccaatttggtccaagttaattagactaaattcagaattttgagagttttcctcagaattcagaatctcggccacaaatggaagtatcagtgacctcttggttgtaagggaatacttgataaaatttggaaggataggaagtctgtgtaaaaagggaaaagactgtaattcgtgaacttttaaccctgactgacgttcaactcgttcctgtaaaacttctgaaatctttgatttatcaaagattccaaactataaaatcattttaaatttctaaactaccatgaaacttctcctaaacgcatcaaacggaccatctcccatttatccaaaatattaaataattatactagacaacatttgccacagaaataattatactaataacatttgccacagaaataattatactagataactttaccacaataattaaagagtatagtgaaagtatattacacgggttgtaaagtgctattgggtgtcctggcggtgagactctatagaatagtatgaagatgtaacttactacatggtggtaaaagggtgtgtaaagcgtcggtaacgtcggcggcgtgattcccaccaagtcatgctccatatgcctacataacctattcatcttcgcaaccttctttatacacccgtgactcaatccctaatacacattttacacacactcaaccgtataaccaatatgataaatagtataggtaataggataaatagtataggtaataggataaatagtataggtaataggataaatagtataggcaataggataaatagtatagccaatataataactaatactaatggataagtggaatactttgatgatgagggatttgttgtaggatgcgtagagtcctttgagggagttgagagcttcgatggcggtgtagtcgaagaggctggtagatgcgaggagtacgataacggtggtcggtgggtcttctctgggtgtaaatgaccttgtgagcatccgcttactggcgtagaaaatgctcccttcaacttcgtagtatttaatattggcctccttgtcatagtagatttccactttaaacttggatttactttcccagacatatgcaaatgccgccaaaaccacgccgaagaacacagccagtggtacgatccagaccacgcacagcaccgtaactgccagtatgataaacgcgtcgtagcgtgagattttcatcttcatgcgcgggtgaagactccgaacacggcctggtaaagcgctaaaaatcaccatgggcacgctgaaccacttgaaacagtgacatgagacactgagcataatcccacacagcgctgggattgggatgtaattaagtatcggatacccgccagccagcataataaacacaaataaccccgtcaccagtgaggattccttccattttgaaccgctgttgaggttcatgatggtaattcccaccattgaactgccgcccatactgcccatgagcgagctcagaaaattgccaaacccaagtccaaacaactgctggttagagtttggctctctggcgcccagggttttcactatgtctgcgattatcagcatctcaatcatgatactggctgtgaagaccagactctgtctcacaagcgcaaagtcgaatttcaactccttaacatattttaaatgcgttgtaaataaaaatgaggggaatgaagtttctgaactcaaattagccacacttcccaccgtagaaatcctgatcgagggtagtgtgtggattactatggagtagtggatcaggattacggtaataattgctaaaagtgccgatgggatgtatttcccgatctttggtatgtagtgaataaactgcgctatggcaaatgctactacgcagtagagaatagaaatatacaaatccgaaccccgcaaatatttccccgtatcgaaatcatgaaatccatgcaactgcgccttggcaatgattaacgccagcccgttggaatatccaatgataactgatgtggataggaattggctaatgcttgccaggtgtatgaatgagaatatgagtaggagaatactcgcaatcatgatcgcgactagtagcctgaccatgctcatgttatggtcatctgcggtaaaggaagtgttttcacgatccagtgcgtaggtgccagctacagctgcaaaggcgccactgacgcctgtgactatacccggcgatccgccaaaaatcgtggcacacagacataaaatccaactcccgtgaagtgccacgtggattggaattccagctataaatgagaaactaatcacctctggcaacatcgttatcgcacataaaatgccatttaaaaattccttcaaataatacgatatcagtcgacgctcagattttctcaaaaacgcccaaccagtcgttatccctatacatacaattgttttgtcaagggtatatagttaatatattcaagggtgatggtgattgtggagtgagtagtaatacctgagacggctcgtttgaggctgtagagaactccggcgtgtattggaaggcagatgctaatatcgtcgcaggtatgtttttcaatttttgaggggattggagtcttcattttagtgaaatcataccaggtggagtggctgaaatcgtggtagttgtactccatgttcggtgagtccttctcaccgtagaacttgtagcatatctccgtgtcatcctcgtcgtattggactacttttatgcagtcgatgtcagggtctgttttcgaccgcttcaaagacgaactactctcatcgacttttattaaaaacgtgtcatctttagactcgttccttaatacgtaactgccagaatcacccaaagtagtctccaaatactgatccttcttatcctcactactcatcatacagaattctcaagtgctatagagagaaaattagtatatatacaaaacagtaggaataaaggtaatataatattagtatgggtgaatagtgaatacgtgagtagatggaggaaatattaaaatatttcaaggaatatgagaaagagttagaaattgaataaaagcgatagaaatcaagaaacaactcatttatgtgtagatcgataaactgaatttactgcaatatttactagacactaaaataatttacactaaaataatttacactaaaataatttacaataaaatatataatacaaaaataaataaatatttgttcaattgttttcattcatttcgaagaaaattaaacttgtgggaactccggccaatggaataacgaattaattttgtaactttcaactcaacacatcaatttagaataacaattttttagtaatttttagcattaagagtaaaatttaaggaatcaatttgacaattggaggaaattgagaatatcttcataacttcaaaaaataacttaaataattaaaatttcaaggaagaaccaaaatttgtttttaaaattacacaaatctaacctaaaaattgttatttgactctaaagtgtgaatataagaaagtgataaaatatggcctaatcagccaaattaacaatctaacgaatctaaaaaatgtttaagttttcacatttaaaattttaaatttatgaataattaaaaaatgtttaggaaataattttgtaaatacttaatctgcctgatgtgtaaggtgtaaatcatgtggtaaaattgaatttaccctttaattccataaacttctaaaacacgcttgattcctcagtttattcatttttaaggtaatttttagttatttaagaatcttcctacacatttgcatgtgcatgttcctttgtgcttttttcgcctttttcacaattttttactaatattttcacaatttttatacatgaatattattaatttaagttattgattattttttaattattttttaattattttcgagtacatttttgaatttgtgattctaatttcctctacacatttcggtgtttttactctaaaatcttgattccgcctgaattcttatggaaattgactgctctggcacctttttcggtaaatatttcggcaaggtttgtcaggtttaagttaatacttctttaggcctttgatcaaatctcctttggctgcccctttcaatccaacccgaacaagaaacttgttaaggaatacaacaggaaaccgaaaaagtacagaaaacccttaaatgatgtcgttagagatgtcaaaggcagagtctcttccaatcatcccaatctacacaaaactcgtaatcactccatcaatccaagtaacaatcacaccatacaattaactatacaattgactatacaattgactatactattgactacacaattgaccatattattaactatattattaactataattgactatacaattctgattgtatattttaggtatgattgaggatgaggatcagtttgttgtggagaatttggagcgggtaaacgagtcttcgggatttaacgcttgtaaatctggtttatactacctgggtaagtgattagctggttaataatgtgtaggagctggagttggcgctgtgggtttaggtgcacttggcgctgtcgcactatttgccatgggcaccgtagcctgttctgtatacatcgtggaacaactactctgcgtcgataaagagtaccaggaggaactcaaagcactacaagtccccaacgtctacagacctgacatccacaataacatgtacgaatacaaaagcccatatcgttattaatatattatcatactattatagcatattatcaactatacacattagtatagtatacaatttactttcaattattgttactctgtaattgttgtgtgtgtgttaagaaatgtgtgtctcatgtgaatggtgtgtctcatgtgagttgtgtgtgatgtaatgttgtttggggagtttggtggttgagatgagtaggtcggggttgatttgtatgaggtggcactctgtgagcgtgacaaaaacttcattttcaaacgttaacttcgccttctgacggttaatcacaaaaggcgcttcaaacttacatttgttatcctcatccgttaccgtaccctatagcaattgtgccaaccaatgatcaatagtatgcagaaaatagggactaataactatataacttcaaaataatagataatcaagggtaaattatagctaaataaggagtaaattaacactaattaaggggtaaaataagcctaaaataagcctaaaataagcctaaaaaatgactaaaaaatgactaaaaaatgactaaaaatgactaaaaatgactaaaataagccaaaaatacagctaaattaagggtaaaataagcctaaaataagcctaaaataaagctaattaaggggtaaaatagggcgaaataactaaagagagtgagaaactttggtaatgatggtgagtgactgggtgggtaggaagacttgtggtttaatgaggtaaattctgtgttggttaattttgtccagattatcggagttgacgggtagactcagaagtttgagtaagttttcaggttcttcaattggaagaatgtccaaaattgaattaaggttaaatgaccgagggtccttcaaattatccaaaatcttaaatattctactcctatgacgagatcgctccaccgaatcacccgtcgtcatcactatctcacccgattcatcctatacacaatatccacataaataacaaatcacacactaaattatgctatattatgataaattaagatattttaagcataaattatgggctaaattagggctaaattgtgtgttaaaacagagtaaactactaaaactgagtaaaatacttgattgatgatttggaagatatcgttgagtgtgacgatgccaatgtgtttgtagagtgggtcggaatcgttttgatattcgacttggcgcacaactgccatgtgtgtctgatcatccttaaagtgcatcaacaccgacaataaccccaaatcgtggtccaccgcatacgcaggctttcctacatcaaacataatcaacccttaaccactatactatagctaattataatactattaactatatacccctagagggagctactaactagtacccctagagggagctaattaaatatataaatagaataggggtaaataccttaaataaggctatagtacgtataactaaggtaataaaacggggtatacctatggtggataaaagttcgtcgagttggtagctgctgttggtgtctaggagtagcagatccttgactagtagaatggctacaacgggttgtgactttgttttatccatgacgggaattttagagtagccttctttggcgatttcttgtatgagtggtgtggtaatcacggcgtcaatgtccagtccaaacaccttgtcgatgggggtcatgatcgagttaacttgcacattactaaggcttaaacagccttttaacagtttagcctcttcctcacttaggactccgccgcactcgcgctgtaaatccaccagcgccttccactgctgcttgttgtagattacctcagtcgttgtcccgataattaagtttagtaacattgacatgggcttagttatggggaacaaagtgtactttaccagaaaagtcagcggcgcaaagaacgaacagagctggagctgataacggaagaaaaccgtctgaggaaatatctcaccaaatatcgtcactatcaacgatgacaccacaaatcctatcgcactacacaacatataattattaactcgtttaaatagtaaaatactaattaaggcgtaaaataggggtattttaacactaaataaagctattttaagcgtaaattaagggtaaataaagctattttaagcctaaattggggcaattttagggccaaattagggctaaataagctaaatttagtgctaaattagtacgtaattaagcctaaattagcactaaataaagcctaaaataggctttaaaaggctttaaaaacaattttaggaaaagtatataaactttttatcttagataaaataaataaaataaataaaattaattattgaatgaataattttgagtaattggtttgtgatttgttgagtggattgtgaatgtgtaggagttacaattcgaagagttctccgacgaagagtacgagtagtgagttgatcatggcgttgcaggcgatgagtgcgatcatgaggttgttggggtctgacctcagggggatgattcttcgtgcgcgtttctggttgacgaagtcctccttggtggtgggtgtgaactgcgataagaggtggagttggaagaggtcaagtgacgtgtagccgatggttagacctgagaatagtgcgctcagggctgagcaaacaatcgtcgctaaaatttttgcccatttttgcatcttacaatttaaacaatttctaaccaattccgcgttacaacagagcactggggcgttactttacttctctttttctcctgcattactcagacacatctccccctctccagctataaaatttttcatgtttctatactcaaaattatcaacagactaattagtaaaatatttgataaaccagcggaattctggcatttccgtcgaaaaaattaaaatttcagttaaatctataaaaataactaaaaaatgatttaaaaaatgataaagtaaataaataaaaaaataataaataaataaataaataaaatgtgttaggaaggttttaggaaataattgtcataaattagattttctgaaattggccgggaatctaacactgttaaataattctcaagctcacggcagattcgcgtataaatgtctaaaggcgtggttggaagtggaagagtgaaaagatgagttggaatagttgtactgtgcgtcaatgtgctgatatggggaagtgtgtatgttggatacttccacagtgactgttgttttttcccctaatattattcaccttagattcagtaaatttaacttctgtaacataatatggccgagtgggtacccgttctcaaagaaaccgcactctccaacaatagctgctacggagccggcattgccaacgtatactccaccctaaatatttcacactattaccatagaatttgtatattatttagtatgttggacccctgagtaattttaacccttaagctgggtcattttaacccttgagttgggtcatttagggcattagttaactcagtcagataattaacttagtcagatagttaactcagtgattgataaatagttgggtaaatattattagggagaggatggagagttgtttgtggcttcggatttggatcacgagggtttgcattgggacagtgtgtataaggatccgtacgtgtatgagacttttgacgacgctgggaacccgctgaagattaacgtggacgagaagttcacaatccgcgaggtttttgagaagaaaatgtcaagtgagggcatttttttgggaggtgaaaagtataccttcgcctcgtatgacccggacatggagagcggctcgttcaagttcgagtgcgtttgtggcgccaaaaacaagggcggatgccatctcatcaaaacacccggcaactacatcgtcgtcgtagtctacgacgaaaccagaggacaagataaaaccgtctccagaatggccgcattcaacctcgctgaatacctcgccaccaacggatactaatcttctttacatatcttcccaatatttaccaccatttagtaccatttagggctaatttagggcttattttggcgtattttagggcttatttacgcccattttagtactatttagagcttattttaagcgtatttagagctaattttaagcgtatttagagctaatttaggcctatttaaaagagttttggagctaattttgtagtattttagagcttatttagagtattttagtgataattttggcactatttgtgtgtttttggtgttgagtgaaatttttaaattatcttttttaataaataattttagataaaaataattttagtgtagagtaaaattaaaatttgtaaaataatgtgaagagatgatacattttgggggtgaagtgctgagtgagaagttagtttctgagagtgattcttccgaggatttgccagaaactgacgagttctctgaaactccgcaggattccaccgtagataacttcaatttagcctcagattccgttaacttggatgaaattactgaggctgaggggagatcagtggatttaatggatttatcaagtgttaaagaaagaattgaaaatatttgcggaattttatccaaatggaaggcgttagacactaagaggagtcgaggtatcctttacggagcttgcaaacgctcacagttattccgcccagtgacatttactcacccggtcatccctctggacccatttacacagttaatttacatataatttacacataatttacacataatttagcttaatttgatagtataatgcccctgtaacaattgtaataagtgcttagaatcgtatattgatgagctgaagaaattagtcactgtatactacggatactctgaagaactatcagactactttttcaaagtattttccacacaatttttccaactaattcattttttagttattgaattaattttcatacaatttttaattttttagttgtttaatcctttggaggcgattcaattttttgatgcgaatgaacagccattaccactcaccatccgaaccaatacactcaaaactaaacggtatcacccccactaattgtctattttgcaacctttttggtatttattttacttttacaattgttttttggtaaatgagtagttactgcagcaatgtagatagatattttcctcactcaatacttaactacttaattaacaaattaattaacaaattaactacttaaattaattgtataactgtgaaaaatgtgtagaaaggatttggcggtgagtttgataaataggggtgcgaatgtggatccgattggtgattggacgaaggagggtttggttgtgcattcttctaaagtccccatcggggctactcctgaatatttagccggacattacattcttcaatccgcctcatcactcattcccgttctttcactagcccccagaccaagttagttacggtgcttgtacttactcagttatctcttacctactcagatattctccccactaaccactagttactcagtcataccagttacacattcacactatttacgcagttatttaactgctaacacattgactaattatatgtgtagatgagctggtattggacatgtgtgctgcaccgggtggtaagactacgcatattggccagttaatgaataacactggcattctattcgctaacgactccaataaatccagatgcaaatccctagtctcaaatattcacaggtattccgttacggggcttgtactcacctagctatctattttctacagagttacccaccccaatgggactctctttagccccgaaggggctttagttattaattctatttaccttgccccattatttactaatttgcaacctattggtattttattttactttttacaattgttttttggtaaatgagtggttacagcagcagaaattgaggaaattttcctctccattcgctaacccgatcaactttgacatttatttccaaaatcccatttttaacaattattttcattaaattatgacaactctgtaataatgttgtagattgggaatattgaatagtatagtgtgtaattacaagggtgacgagttagtgcgtgtgttaccaaagatggaccgtattttactggacgcgccatgttcaggtctcggtgtcatctcccgtgacccttcaattaaagtaaaacgtggccttaaagatttacagcgcaattctaacctgcagaaacaactcctcacagcctcaattaacctcgttaaacccaatggaattattgtctactccacctgcagcctctcaattgaagaaaatgaacaagtcatccactacgcaattaggaaatttaatgttaaacttgtgccactaggtgcgttacggggggtggtccgcccacacctcccacacacactttacccctatttacccctatttaccctcttttagtcattttttacccttaatttagctgtattttacctctttttagctataatttaggcttattttagctgtattttagccttaattacccttattttagctgtattttacctctttttaggcttatttaccatactatagtattgattattgtgtttagggttggagattggaacgcctgcgttttcgagttttaggggaaggaaatttcacccgtcaattgctaagtttgctcgccggttttaccctcacaaacatagcctcgacggcttcttcgtcgcaaaactcatcaaactaccgaactcacacatacatcagaatcaccacactaatacagataaataaaataatattattgttattgtgtgttacaattggtgttgaagcagccctgttcgaggcagcctagctgtgtcagtttatcccttttattaatcttgtctgtgtgtaaatttggtactatgctgttgaagcttgtgatgcgctcggtgaccgagggtaggcgtgactttaagttgtaaatttgctgtatcagaaactcaaaaatctccttcacgttgtagcccgtgacagcagacgcctcgaaaaagtgcaaattattctcactcgcaaactccataccctccaccgccattaccacgtccaatctcacgttatccccttccctaattaatcattattcacattatccacactgttaataagttttatgagttagaaattgtaatatttgttaatttagattaattaattaatttggggagtttttaatttttttcactttttcccttttttacccggaattacgtagctaattaagtaccccgagtgtgttctggttataattaagtaaactatgatagatacgaattctgggtagtcgggataatatataagtataatactgtgtgttggtgaggtcgactttattggcgatgagtaggattacgatatcgtcgtacgacgaggctctgagctcgtcgagccactttttacagttgtaaaaggagcttcggtttgtcacatcgtagactaaaagcgcgcctacggctctcctgtagtgagcgctggtgatactgcggtaccgctcctggcccgcagtgtcccaaatctgagcctttacactaccaccagacgccaaaggcaccgtcctcgtagcaaactcaacacctatcgtagccttcgcctgcacaggtaagtcaccccttatataccgacacaacaaatgagattttcctacaccacagaattaagtttataaccgtgttaattattgtatagttaagtgtttaaccgtgttaacaagtgtatagttaagtgtatagttaagtgtatagctttgttaattagaggtataactgtgttaacaagtgtataattaaatgtttaactgtgttaattgggggtataactgagtatggagagggagagggagctacttaactatatacccctagagggagctgatttatggtacccccgaaggggagctaattttagactaaataactaattttataccataaaaatgtgtaaactaagtaaactaactaaaaatgtgtaaactgagtaaaaatgtgtaaaaatgtgtaaggaattaccgactgtggcgtcgcctaggagaataattttataaacgtgttcgtagtcctcgtcggccattaaaattacactaaactaacattttttcaacaaatttatcctcatttacacctcaaacatccacacatccgtgccacaccatattacacccaaactactccaatacacaattttttaactcaaccaagttaaataattatttaaaaataattcaataattattttatttatcccttgataatatttgggaaaagaatttttttaatttttaacaaatttccacaaatttataaaatatttaatttataaatatatccccaaattatccctaaaatatacaaaaattatccctaaaatatgtctaaattatataaaaattatataaaaattgtagtctatgttggtggtaaaaacatgtaaataatgtaattagtgtaaaaaattgtcgagacgtaaatctgttaaaattattataataatttttttcgcaaaataattatttaaataattaaattaaacaattttgtgatggtattttaaagttatttggggaatttgggtggattccattcccacactcataccactttttattatccaccaatgattaatcttgaccactttcctccaagtcccatactcaacccagttaactcaaatgacacaatttacacaataaactcagttgacacaaattcaataaataatgtgggaaatgtgaatttgtttggtttgggggatgggataaaattgggtacgaccataattggtatgaagtttgaggatggagtggtgttggtagcggacggtcgcacttcctcggggcagatcgtggccaacagagtcgcgcgtaagattacgcggatactgccaaacattttcatgctaaggtcaggctcagccgctgactcacagacactctcaaccatcatacgataccacgcacagtcactcaaacaacaactcaaacccgccggacgctttccaccaagtacataacacatagttactcactacatagttaccacatgtttacttagtttacacagtaactacatatttacttagtttaaaagtttaaataattaaattaaagctaaaataatgtaaatttggtgagattggggaagaattaaatttactcattttaacccctcagcaccccttaacatcactaataccataccatactacactatactatactatacaatagtgttatacggtgttaaaaggggttaaaaggggttaaagtctgtgaagcgaaatttttcggaaatcgcgccaaactcctcaaaacaaccttaaaaataattatttataatatttaatttatttataattatttaataaaaattgaattaaaatttggaatttggaccataggtacgagggatgagatggacattgatgagttgagtgagttttcaggtttcaagacaaacgagtataaattgagctcgttggagaacacaccgttggtccggtcactggccagggctacgcataacttagtccacgagtacagaaatatgttatactgtggcgtgattttggccggagttgacagcctgggcgcgcagatattcaacgtgacggtgggcgggacactgattgaaattgaggactttttagccacaggctcaggctcatcgttcatcacggcctttctccagagtaattataaaaagaatttatcacaagacgagtgtttaaaattgttgaaaaggagcatcgagtacgcaattctcaacgataactcctccggaggaatcatgagagcagtcgtagtcaccaaacataaagtcaccgagtactacttcacacaacctcactaatttttatcactatcttatgtggataactaggttaaaatttgttaactcgtgattttagatttatacccccggaggggagataataattttagaataggtaatgatggagaaaaattgcactttggtgcatgatggaatcttgagaaaaaaactccctaactcaacacaatcccaaaattatataaataaataaaattgtataaacaaattgaaagataattggagagaatttgaggatggagttggaagaattgagactgagggtgagggctgctcacccgactgctgagtctgatgttgaagcgctttttaacactaatgacgtgtcaaatgacggacttttaccctacgacatcgtagatgctcttttaagacattatttattacttcaaggttttcaagaccatatcttccaatttctcgatactaatggtacgttacggggcttgcatcccctcacacagatttatccagttacccacctgactacttagttcccctcgggggttctagttttacagttatttaaccctattgggggacctttctccgtaacggagcttgcaaacgctcacacacttatttattacttagctccctcttccctatgtagctctctctaggggtatataattctaagtatagttaagtagctccctctaggggtactttattatatactcttaactatactacaattactatgctttactacatacccctagagggagctacttaactacttactatattaatactatattaatattacttaactataatactgggaactgtgtgagaaggctcgaggaccagtcaatggagtagactggtccgagagcgaaattttttttcttgctgctcttttttcctcgcaaattctcacacagtttactctccaatcactccttaattaccattaatttaccccttagttaccaatagttaagtatataattactattaattactgtgttagaggtaaactatgttatatgtaggtaagttggatttgggttatgtgcggaaaatgatgcatgagagtaacatgttagtggtgaacgaggagacgatgttaagctgtgaggagatgaaactgctggccgtaatctggctcaaattgctaagcgactcctacctcgccaaaacactaaaccaaccaaaccccaaccaactccaagttctcaacccaaacgattctgttacctcaaatcaactcatacatctcaccactcatactaatactaatactatggagaatgtgagtaatgaggagaatatggacaatagtatgggtaatgaggagaataatgtagaagagggattggagagatatatgagtaatataagggatgagatagagaagaataggatgtgtgggataaagtgttatgcgtatccggcgtcgttgacgccaaacggttcatgcgcttccgcaggcgccgtcgtaccacaccgcagactcaaaacacacaaacaacataaaaacctcttcacactcttcgggtgctgctaataccactagtaatgttaacacacactagtaatgttaacacacactggtaattattgtttgatcataatttatagaaaataattgtaaaaaatgggtaaaaaaaataaaatgccaaagttgatcgggttaggagaaataaattttctccgatgacatttctgctgcttcaataacacatttggtaaaaaataattgtaaattgtaaataaattgtcattaggttgcaaattagtaaatatctggggtagaggttgagtgtttggcagttgtaggagtaacttatcaaaattaagagtgaagagaataaaaattgaaatcgcaatgatttaatataattaataattttacactttactactcacaagtggttaaatatttgagtattcataatttagacaaaaaattagaatattattataaagtttaaaataacattaataaaataattataaaaattataaaataaaataattataaaataaattaagaataaaataataaagttggaaaggatttatgggtaattgttatggtattgtagtagtgtgtagtgcattaagtgtaaaggatgtgttctgttattaatggctgaggagctggaaacgcttgttataactgaggaaagtaaggaaaaattagaaaatgaaccgaaacaagacaaacccctcaaaaagaaaaaaaaattaaaaaacaccaaactcaaacctacaaattataataattctgtgaataataatgtgaataataatgtgaataataatgtgaataattctgttgagagtttggaaaactctcctgttagcactgtgactgatggtcaaaatgttgaaaaacctgatgaaaaggtcaagaagaaaaaacaagccagactagtcaaaaaaacaccaaatcctctcccgatcactaataacactagtgataacaatgataatctggttgataaaggtaggactgtggttggtagggaaaaggttgcaaaattgaagaaaaaatttgagaagcctcagtccacttataacaaagttctccacctcttcaaacataactcaaataatcccactgataatactaacacctccagtagcagcaatctacagcagcaaaaagtaccacaaaccgaggaaaataccacttcagaaccagacaaatctgaacctcaaaatccatcacatgaacaaatattacagcagcaaaatggactacagcagcagaaactgcaagagcaaagattacataagcaagatggactacataggcaaaagctggaacaagaggtggttgactcagatttggatgtggtggtaacgaatgtgactacgggagagaagttgaacacagtgaaaatgcccgtcagcggtacaaaagtccgtggcgtgaagaagataaaaagagcgagtgagaagatcccgcagatactgttgaataagtcaaggaatgagactggcgtagtgtttggtgggtaccccgtgctgaccctgacgtcttcagttatattatttgtatttctggcccagctggtgctgaataaaatctcatttaacgggcgctgtgttagtaaagttttgtacccagtgttgaatggcgggaaaggataccacacgatgtttggctacggtgcctgtgagtataatttacagcagaaagcggaggaaattgggtttgtaggcgctacggccaccgacaaaggctggccggcgtcactcgtaagtgatgaaaatgttgtggaatctggatccacatttgactcaccaaactacagaggattcacactcttcggtggaatgaacgccaattacatacggaactataaagagtatttcaggtattctacctagttatccccacttattacagtatttgcaacctaatgacaactatttacaatttacaattattttttggtaaatgagtagttacagcagcagaatgggagttattttcctcgccaacttacaaccacctgataattggtgatttaggttattttggagcatgtttatgcatagtgggattttacatttaatatttaatttaattgcacaaacccagatactgtggattatcgaaccggtaacttttactctagttatttaaccccacttactattcatatttgcaatctaatggtattttatttacaatttggaattaaaatttggtaaatgtgtagttactgcagcggaaattagaattattttcctcggtaaattgtaacccgatcaattttgacatttatttccaaattccataattttacaattatttttcaataaaattgattaattcaattagctatacgataaacatgtgtaggactggggttttgtgcgtagtttgagtacatttctgatgggtggttttgtgggtaatttatttgctggagtgtttgagccttcatttactgttgttggttcttctgggtgcatgtttggtcttattgctgctcttatcccatactgcgttgagaattggacgcttctaagatcaccaatttacaccttcgccttcgctcttgttattaccattatcagcttcaccgcgtttaataataccgtttctacttattctcacgtggtatccgttacggggcttgcatccacttacttatgtagtttctacggagttagccaccccaatgggactcttttccccaccttaccacttactacttatcacttaccacttagttataatattatagtgtgatgatgtgtagggtggttgggttggtggattgctgtggggatttgcgacgttgagatcgacgtttaagctaaaggactgtgccattagagagtctctcctcctctcgttcttcttcaaagataaacttaacccccaagacaaatccaaactcaaagaatcctacctactcaaacgtataccaatactactctataattcttatactatagtatagttagtatagtataataattcttatagtataataagtataataagtatagtatgttaaaaatgttgatagagagaaagtgtgtgaatgagataaggatagagcgaaggaaaaagagttttggtcagcggatgaagaagatggttttatatcccgtggaatacttcaaaaagggaccctttgatatactcatcagaatcataccactcatcgtcctagtatccacccactaccatatcctcacatagttatgatattactcaatatatagttagaatagtacagtgggtaatacggatcccctatgaaaaccaaagtcaagcgggaattggcccggatagtagtgaggtgggggactgccaaggggagctacccactaactatactattgcagtttactataatattaaatagttattaagctatgatagagcaattggtatagtaatatctactatgaatagccgagtcaagcgggaactggcccggatagtagtgaggcgggggactgccaaagggagcttagttatactattactatagtaaataactatagaataatagtatagtatggtatggtaaattgtttgtaggtggtggtgttggtggtgttgagttcgtatttgacgatagagtcgttgtatggtaagatgtttccgttggatgagacctcgaaagtgtcgcagtgttgctataccactgcgaaatccgaagctccattcaccagaaaagtcttctggtgcttcgaaaactaccaaaccgcactcaacttctgcaataaatcctaacacattttttccccagttcacacattttacacatttttcccctagttcacacattttacacatttttcccctagttcacacattttacacatttttcccctagttcacacattttacacatttttcccctagttcacacattttacacattatttacacactatttacacattttacacatttttcccctagttcacacattttacacattatttacacactatttacacattttacacattttacacatttatagttaatttaacaattttatgggtaaaatgatttgtgattttgggatcacacaataaaataaaattttccaaatttctcaaaatgtttaaaaattaataatttaaaaataattaaataatttaataatttaataatttaacaatttaataatttaagggaatgttgaaaaatggttggggagatgatactgagagttaagagtaagattggtataagtcgtctggagctaagtgaggattccacagtcggagaccttaaaaataaaatcaaggaacggatccaattcacaaacaactcacaactcaaactttacatcgaatacaaccatcaacacgtatttcaacttatttacacaataaattatataataattagttattggaggatgaggtgagactgagtgagattggcgtggtacacgggacgagtttggtgttggacaacggcgttgacgaaataagctacaaaactattacaaccaggccttcaagtgtgactgaggaaattgatctcaactcacagccaaatgagacaaccacgccccccaattcacaacgtatccacacagttccataattaatttacatagtgtaaaatatttttatagtgagtgagggtgaaaagttggatggtccgttgtttaagtcttttgacgcgtatttgcatgagaacgggtttgaaattggtgatttacccctcatgaactcttttgttccaattaaaattaaacgaggagctattaacaaggtttccgttacggtgtcactgcggggcaccagtttcccagatatccctagttacctatccccattatttctctttttgcaacctttttgatattttatttacaatttgtaattattttctggtaaataagtagttactgcagcaatgtggaggatattttcctcaccatttgctaacccgaccaacttttgcatttaataaatcgtgtagttaccgaagagtataacgataaggcatcagaagtatcggcatgtggatcacttggagatgatgaatgtggacgaggttagaggctttgctaatttttggttatcggagttacaaatgagtctacaacgtatcggctggatgtatggctattataccgaagatcatcactacccatacggtatcagagccgtttgcgaagccatctacgaaccccctcaattctccaccgtatctactatccaattatttacccagccccattatttctcattttgcaacatttttggtatttattttacatttgttaattattttttgcgaaataagtggttactgcagcaagattgactgggtgagaaaatttattttcctaacccgatcaattctggcattttattttttttacccattttttacaattattttttcctaatttagaccaaataattacaatagttattttactaactccgttctgcagataaatgacgttgtaatgttggaggatgagatgttgtgtagtgtggacaagatagctgagaaacttggtttagagcgtgtgggtatgatatttactcggttacctaacgagtgtttcttaactgcccgggagctaatgcgtgtgatagagatgcaatataactccttgagacacacacattacaccgggtatcccgttagcactatggtaacctgcaccatgtcacctgatgattcaggacaacccgtcctcaacgccttcatggcctctgatctcgctctagcactctacagagatgaactcttcacctcctctcaagcattctccaacattatccacaccaagtgtgatatcaacgatcaatctagtctaagtagtaataatagtagtagtagtagtggtaatagtgtgagagatagtgtgagaggagtggagattggggagttgaagccgatactgatggagagtggcaaggaggttgtgaactttgacacgagttggctaattgtgaggattaacgagtcggcgcccatcaaacccaactccttcttccccaaactaaacacgcccttccccatcgaaaatcgtaacccatccaatagtaataacagtggtaatagtactggtaatagtgtgagtagtaatgggagtagtagtggtgtggacggagtgaggtatggagagaagttgttggataagaaggagatgttggagtattttagtgggaattcgggggatttgtggaataatttccactttttaatttacgtctgcagagtgttagacgtggacacggcactctccatctgcgaatccatagtacaacaacaacccatcgacgatctcatcaaagaattactaatacactaataccacatatattattgtatataatatatactatagtatagtattagtatggtattagtatggtagtatttagtaggtgtctgggctttaggctagtaaatcaggtgtatattacatagtttatagtactattaagagggtttaagatgatatttagagtgttttataacagtattaaacagtattaatagtattaaggagtgttaagtaatgtaatagaatgtactttagtatactcttaatagtatacatatacaatgtatactatagtatagtatagtatgtatattgtagtagtagtaggtgtctgggtttaagggtagtaaattaggtgtatataacatagtataacaaatctattatacattatttaagcttataataacagtattaaggagtatttacactgtaatgagtgttattttattgtatactaaagtatataatatacagtagtatactcatactactatacatatatactatagtatataaagtatgtatatgtgtttgtgatctaggaggttatggcattaaagataaacttgatttattgatggaaaaagcacaaacactttacgaaaaagccgatacactggctaatactacagagagtgcacttgctcagcttaaatctccagccggaaatcttaagaatgcagccaaaggcagtggtagtctatacgagaaagcaaaagatctagcaaaggatattggtaatgatggtaaggctggagatgtcataactgcatttgaagacgtaagaactaagtacaatgaactaacaggtaatctgaattacaatacttataaagataatgagaaggttaaagctgttgatgacgcctacaaaagtcttaaggatgtctacgatacaatcctcaacgtcaagaaggctaacctactcaaagctcaagttggtgatggtaatgctgatcaaaagatttggtccaaggccaaggacctctataccaaagccaacttactagccactgcagtatctagtaataatgaacttaaagatcctgtagacgcccttgctactgctgtaggagccgatgataacaatggtctaagaaaggctctctccgaactcaacagtgatactgataccaataaggctgattttgttaaaaaggccatggaagtcatcagtaactacaactctgtaaacaatgcctacaatgctgttaaggcaaaacaacaagaatatactgctgctcttactactagtgaatcagctaaatatacccaagttacatctaatttcactcaacttgaaagagcctacaacctggccaattgtaaggctatcactcctattcttgacaaactttggattagatattcctccataacatgtacttggtccaacttaaaattttactctatttaccgtcacactggcacgttaccaccttccactcagcacatccatcacacatataatacaataataatatagtaaatagtataattaagtagctccctctaggggcattagtttattagctccctctaggggtatataattagtaatgtgtagttaattagctccctctaggggtatataattaagtatagtaaatagtatagaaaattaagagttaaagatgagagtgcctattctaatatggttggatcccatttgtattgctaatttgtaatcacttgacattcccatgctcattacaaattcccccaactctccaaactcctcctctaatctcttttttaccccgtttaaacggtgaaaactgtccttggtaccatcaccaattgtcattaacccccggaatttcaccctctcagaccgcattacagagcgtaccaatgatataattaatgtaatatttctatagtctatgccgtactgcgtgggttttagtgttgtgtttacctggattaacacattgatttgtctgttcaattttgttgtcagttgtgacaacttgttgaataattccatagaatccaccgattgtatcatgtgtagattggggatttggagtagtttggcgcatttgttggtttgcaagtggccgataaagtgccatttaactgtggaatccaactgcgcagccttctcacacaactcccgcacacgactctcaccaaagtccaactggcccattttaaacagttgtcctatggcgtctacagtacaatttttagtcaccacaagtaactccacacccaaaccctcaagctcagacctcaatcccagccaacgctcaaccgaacccatcttcaccctttttacccaaatttacccttttttacccttattttacccataatttacataaatttacggtatggtacataataatttagaatttacagtgtggtaaacaaaattaaggggaataatgtggattaggtgggaggttaggaaatgtagtcgagaagatgttgtgccgcggctttggtggtactaatcactccgccgtccagtacgcctaattatctcatcgtcacattattatatctagtatggtattaagtaaaaattagctccctctcgcgttgtcacgagtttacacataattgacacaattgttaaagataacacagtggtataatcaatatgtgaataattggataagtgatggagtggataaaaattacgttgtagttggcagagtgagtttgcggtgtcgtcgtggaagcaccagaacgtgttggagggtaagtggagttttgcgagtttttcaggtttaatgtagcagcaggtgcacttggcaaacccagagaacttcggctgaccccaaggctgaaaattactatacaacttctcctcaaacagcagcaacaacaataccaaactcattatcaactatgggaattatcaaccgtggaaattttctagctacattgctgctgtaactactcattcaccaaatttaattagtaaattgtaaataaatatcaaaaaggttgcaaattagtaaataatggggatgcgtaagtaggtaactagtatagaaatgagtaactgggtaaccagggactctgaagggggaagagtcccatcggggtggctaactctgtagatataagtaataaatgactaagttagtacaagcaccgtaacggataccaatagtatcattgagatgatacgaacgacccattcacgtaatcgatttttaaaggcggcggtgccgttcttttccaaacgcttaaagataaagtcaaacctactcctagtctcatcactaaacttcacattcttccccttcaaatctatttacactttaatatcattaatactatagtctagatagtacagtggtaaatatgtatcccatatgaactccaaagtcaagcgggaactggcccggatagtagtagggcgggggactgccatggggagctaattatatatactaatactatattaactgagtaactagtgactctggatgacaaagagagtcccatcggggtggctaactctgtagaaataactctgtagaaataaccctgtagctacataactagtgtgagcggtagcaagccccgtaacgcactttgtttaattcctttggagactttgagtttttcttgatagttccgagtaatcataagagaaaaaggtttagtaagcatcacagtctcgtaaatagtacaagcgtcgaaaattgatatactacgaatcgttgcaaaaccccaaagtagtccatacacacagccgccctatgattatattatctatctaatttagtactaaatgagcgtaattgtcaatgttttgtgtgaatcccatcagaactccaattatctacacaatcattaatactccagtttacccaaaatgttaaatagtgtaaaaattacaatggatatgacgaggaatatgatcaggaaaatcggatacggcaacgtcacccaatactctataaaatgtgtaaactatataatagtgtgtaagaatgtgtaaaaatgtgtaaaaatgtgtaaagtgtgtaaaatgtgtaaatgtgtaaaaaagacacgttagtgtgtaaataaaacacggaatgtgtaaatgtgtaaaatactataaatagtgtgtgttataccaatgatgtaaggaagtagaccgccgtagagaccgtagagcgcgcctgaggagccgacggtgatgtaacaagggtccagggacgctgacgttatactactgcccaaagcactgataaagtacaataaaaacgtacgcacaaagccccagtcctatacaatatttattctctagtcaattgaattgatcaattttaacaaaaaataattgaaattttcacgattttggaaataaatgtcaaaattgatcgggttacgatttaccgaggaaattttctgtcattattgctgcttcaataacacatttaccaaatttaattagtaaaatgtaaataaaatacaataggttgcaaactggtaaatatatggggttagctaaggaactgtgtaggagataccggttcgatgatccataggatttgtatttgtgataacaagttaattgataaatgtgccacacctttatgcataaacgtactccaaattattctaacacattgttaacgggttacaaattcccgaggaaaataactcccacattgctgcagtaactacacatttaccaaattttaattaacaaaagtaaaataaaatacaaaaggttgcaaaaactgtaatcggtggggctaaataactaaacgagataactctgtgggtacctaaaatactccttgtaattccgtatgtaattggtttcgagtcctccgaatgagaagatggagttgatgtggaaggtgttggaatcagtttcaaaggggaaataccatttcgttttcttttcaacgttggttacgttcgttacgttggttattggccatccggagtcagcttccgacggccccatgaacacacgattcgcagcattcgccaggagattaaactcacaagcaccgtgaccgataggtataaacatgtgcctctgtcccggttcttgcttatataacacacgagaaacacaacgtccaccaaatgtcgttttattatacaccatcctacaatattaatattaatttttgggtagttttatgaaaaaataattgtaaaatttgtaattttggaaataaatgcaaaagttgatcgggctacgatttaccgaggaaattttcctccatttctgctgcttcaataacacatttggtaaaaaacaattaacaaaattaaataattatcaaaaaggttgcaaaaagagaaataatggggctgggtaaaactagtatgatatgagtaactggtaaatataggtttgccgtaggaattgcctgaacgcaacgtactgtgcaaaaaaggtgaagagaatggcagtggtagtgaagatgagcacgagtaatcgtcctccgaggggattatctctacgtttcggatccttgagtttgagcagttgattacaaaatttactcttacccttccaaacaccacaattattactcattcctcgtcgaatccccataccatccaccttactaaggttcatcttgttcacactattcacactgtttaatgtgttcacactgtttactgtgcgtactctgttaacggtgttaactttgttcatagtgttgatagtgtttacggtgttgactcgattgacagtgttaactttgttcattttgttagtggaagtgttgttaggatcggaattgttaggatcagaattgtgatcaaagagtttgattggaattttagaatttttattcgcaaaatttaaatttctcattattttttataattaaatgcaaaaattttattccagatacattatgcaactctgtaacactttcacataaacactcaactagccactaatctcattactgtaatagtagctcactatcccctatgtagctccctcttctccaagtagctccctctcggggtactagtaagatagctccctctcccctatatagttaagtagctccctctcgggtatgtagtaaagtatagtaaagtagctccctctaggggtagataataagatagctccctctcgggtatgtagtaaagtatagtaaagtagctccctctaggggtactagtaagatagctccctctaggggtatgtagtaaagtatggtgagtagtagattaggagttgagagagacgattcgttgtagaagttgttgaggatacaaatataatttcaaattcaaatttctcaccagcccatcctctaaaacaattttacgcttaaaatactataaaaagtgtgtaaaatactatagaaatgtgtaagaatgtgtaagaatgtgtaaaaaatgtgtaaaaatgtgtaaaaatgtgtaaaatactgtaaaagtgtgtaaataatgtgtaaaatactgtaaaagtgtgtaaataatgtgtaaaatactgtaaaagtgtgtaaataatgtgtaagaatgtgtaaaatgtgtagagtacgttgagtaatttgtagtagttgtttatttggagtgatgagattctcaaatttaatgtgcaaatttccgtacaatatcaacggcatataatccctcacaaacgccctaaaattttctcacacatttttcaactaatttataataaaataataatgaaataatgaagatacgaggagagtgagttattgttatgttgtaggataattttggagatgaatttcaggtccaacggcctcgaatatactaacctatccaaccttcttccaattatcatcccattatatattttatatatataatttactggtcaaattattaattatcgattaataatttgtatatactgaaaaagtaattatccctagcagcagaaattgatttacggagaaaatttatttatcctaacccgatcaacttttacatttatttttaaaacaccgaattcacaataattaactaatttaaatcatatacttgtgtaagagtagaaagagttacaagattaagtcagatgtagtacgagcggtctcgaagttcccaaagcctcctccacctccttataatattttctcgatctcttcctcaactctcttttttccaatactcccgtactctcatccttaacactaactccaccattcttaaccttactccggtctacagcattgtgtaagagtttgagaagtcgttgtgagtgtctttttttaacttttgagactttgtccatagttttctgaggtcttaaactgctctgtaccactgtgctgtttatcagtcccgccacatcggcgctttgcagaccactactaatgttcagagtactcttggaattaacctttggaacatctgcggaaaccctgggaacatctgcggtaaccctgggaacatccgccgtacagtggagcacagtgtccaatagctcaaacgcactacgggaatacaatactaatctaccaagagtacctgccggtgcgagtttgagtaagttcaaatgttccaccgacactacgtcaacgcctgggatatttctaaaggctcgtttcccttcaactgctgaacttctcaataccaccagcggtcccactgggtatttcctaccctttctctttgtccttttcactgtgttgacacgtttcaactcgtctcccaagcccatggagtttagtaactccacggcgtctctcgttttagtcaaattttctacagtgtcatccaggactagagggagttcggggacagattccaccctgtgcccacgtgacattaccaacggtaccacagccgtagctgaaactgccgatgctagggctagtctacgttctttgagattgagtttgcggtgccaccggcgccatgttttggtgggtgcgaacattccgccggcacggcagaagttggcgtaggcggcttgtccggacctgtgagtgccaccgcccttgactctgggagtcctggaaagagcacggccggtgccccaagaacgtgccgacgtctggtaaccactcagacgtgacactgcgtacgcctgacgcttgttcttggacatgttcgtatggacgtaacggaccaaatctgaacgtaaaggagtagaaaataccctaggcatcaccgtagaacccatacgacgctccgtagatacactaaacaccgataccacaggtctatgcaccattatcaactatctatcagatttttcagataattctattttatttatttattcaatttatttattttatttatttattttatttatttgttaggataattttgaataatttggtgatgaaagttggaatagtgtcaaagaccccattgatagcattaattaatccaaagtatacaataagtgaatttaatatataataaatgaatttaatatataataaatgagcttaaaatatgataaatgagctttaaaattctatattaggattgttccacgggatttaaaaattttattttagaattgaataattttaggattgggaaataattttgggtgagattggaaatttaataatttccgcaatggagatttttaacattttttaacctcgccgggctctggcatacggccccggacaacaatctttccactcatttctcacctcttttaccattttttaccagaatttgatgtttttccactgaaattgaataatttttaatatttgacatttgaatattttaacatttaaagttttatattttggcataaaaatttgaaatttaacatttaacgtttgatattttatcaaaattttgaaatttggcaaaaatttgaaatttggcataaaaatttgaaaagttaaaagttacaaaaatctcaaaacttaaacagacaaaaatcagaaaaccaaaaaataaaaaattattaaaattattaatcgctaaaattactaaaattattaataaattgttaaaaatattaaaattactaaaattattaaaaatttggaaaattttgaaaaatctgaaatttggtgaaatttggcttaaaatggactttgttgatcctcggtactttgctaaaccacaacacaactctctcacacacacttctctcaccactctgacccacgccactcttaccaactgtactgccaccgatagaacccctgacacaactgagacaatggtggagagaaaattcaatagtattggtgacgttggattgagtgttggtagttcgattgagactgtggacactgatgaattgtctgacgtaaagttcagaagaccgaaatcgttcctgggcactaaaatccccaacccgaagaaagaaatgaacaaagaaatgaaagaaatgaacaaagtcgtcaaaacaggactccacaaacgcaccaacaaacactttttcgatcccgattacaactttactgccactcttaacactgtaaactctcccaatagtgtaaatgtgaactctcttaatactgtaaactctcttaatactgtaaactctcttaatagtgtaaactctgggaactctaacactgtgagaccgggtgaattactgttgatggacccgaagagtgacgagttacctcgagttccatcgttttttgacttgggtcaggtggacttgcaccgtcagtattcgctcaaatccactgaatcgttgaagagagttggctccacagactccttcgagtaccttctctttggcgattcccaagagtatttttccatactccccgttaacaatgagagttctgagttatacgacacggggataaaggtgaatagggaactcaagctcgatcgctacacactgctagggtttcactttaataaacttctcaattcactctcatggctcgcatctcttcaattgagttccagggcttttaacagtaacggggtcaggttcaacggggttagtagagttactagggttaacggagttactagggatagtagggttaacggggttactagggatagtggtgttaacggggttactggagtaactggagtaagtagtgttaagaataataatagtaaggagatgaagaattggaacgagtgtgaggatgacataggtgggatagatgtggattttagtatggatagtaagtacgtagacttggagtgcggtgggaagttcagacactcaccaaaaacttttcaaaagtcttactcatctccctctttctcatctcatactttctccagtcataattttcacatttctacccggagtaatggagttagtggtgataagttggtgtgttcgccgagatttacaagtgtgttgaagaatgtgaacagtagtatgaaccatgacaacgctgacgatttcgaactcttttaacctaatatcttactcttattttacctattatactatagtatatacttagatatatacccctagagggagctactttactatctaagggagagggagctaattaactatataactttaatactacataaatactgtgctatactcttaaacccagacacgtaatactatactatatatactatatatactatataatatatataatatactaaagtgtatatgtatatgtatagtattaggagtatactagggtatattatatactttactatacattaagataagtatagtaatcatatttgcatgttatttacagtataattaaaccctaaattacaaattttatatgttttggtaagaatgtactagccctaccaaagccttactgacccctcccaatcactagatataatgttaatactactgaatatggctgcggaactacagtataaagctgaattaatcaatggtaaacctgttctttaccatagaattacacctgactccgcctggcgagacattacacacactagacacaaccttgacaatttggaactctacgacttgaatatcaagttaaccacagtgtcacaatgttcaacagagttatccggtctcctgtttaggatattcctgaacttcctctgctaccactttaagctgggtgacaagttattatggtcctactgtgcagagccttttcatggattaccaatccaaatcctattcaatctcaagaacaacactatgtcattactatttaatggtaacagattaaagaatttgaatatgaaggggtatgagtgtactgactggttgaagcctgggaaaccactgaaaaaattcaagactagaagaataatatcacatgagggaaagttagtagagctgtttggtgaggataaaccattattacaaatggtcgttgaaaaggaaaagttttgggagtacaaggaaggcccactgccaatctcacgtatttcacaattgccgcagttcgccgttacactcgttttcccaattaatactccagactcaaccgatatcaatcaccaaccaatcaccttcattgttactcccacactaatgccataatatattatatatatattatatatattatattatatattatatatgttatactatgtatattatatactatatatattatgtatatgtatattatgtatatgtataatagtataggtacagtatagtaaactcctaattaaccgttatttgaccaaatattatctatttaatgactgaaacagatggaataaatccgattataaagagttgtaaaaaaaggtaaaaattcattttacggcccttgaccccaaatttgactttttaattcaactcctcaaacatcaattatcttactatttaacattaatttcgcttattttacatcttttccaacattatcaaccatttaacacgtagagaattcgtaacacaattgttcattcagtacgatgggattactggaactactaatcatatgtgtaagttaataacctaattaactaattttccagagtgttgaactggtgattggtgtgaaaaatggatttcctaatcttgagttagggaaaccgttaccagccctggaaccgttaacactggacataaacattgaaagttctactgataatattaattatctggaacaagtcaatcagggcatttacacacccagccacggctacggatttcacaaaatcgtacaacaaattacaactcatccaggtcacaacactccatcagataacacatcagataatattcaatctgataacacatcgttagatcttagtgcggcacttacactgggtgaaactgaggagggagatgtgccgatggattttatgagggagttggagtattctgcggtgtttgagttgatttaccagagtacggatttgggcgagtatgtgaaggaggtgatttgtacccgcgtgttcgccagggttcacatgattattctgttcctcttcaacggcgatgttggcgtcctaaatcaactcaacaaactctggacactcacaaataaaataattctcaacattaccaaccatttttatcatacctacacgaacagttgtaacagttgtaacagcagcagcagttgtaagagttgtgtaggttgtggtattactaatagtaatagtgaaaacagtgaaaacagtgaaaacagtgaaaacagtgaaaacagtgaaaacggtgtgaaaagtgttgataatgagaatcctgggatagagttgggtttgagtgagaggttgagttactatttcgactcgagtgaggatttacagtgtgaaaaggggaattttaccgagtttacaccgaaagattacaattctataagtaaaattgtgtataagagtgagttgacgggtttggagttggtgatttggcaggcgcaaaactggtttgaaaatgccaaaaacgtgacattaacctcggtgtctgatgtgaaatatttgttaatattacaagtggacaataattaccgcctgttcaagtgggatcagaaaatgtgtttatggcttgatattacgctggaaagccctgacctaagtcaactaccggttgaaattaataataaaaccaattcagcagcaaaaatgattaacaattatgaagtttaccttcgagagttaaattactgcgttaaatttcattactccagtgaagtaatgaggagatactcagccaaactttacacctcatttgagtacaactttctccaaaattccgtaaatctctcctcaagacaactatttaacacggaaaacactgatgaaaagagtatcaattagatttttagttatctagaataccagttaccccctctgtacaccttttctatacaccttgaataaacttgttaaatttaatttctatataatttacataaatttggttaggtggatataatgttgtaggagtgtttagaagtttgtatggtaggggaaggggtatgaaggagggcgtagaactggacattagtgtgccagaagacatcaactaccacagcgtaaaaaatggtaatttcactcaatttttacccgcgcacggctacaccttcagcaaagtcattcaaacccacatggtacacaatagttccagtaccactagtactagaattagtaagagtagtgggagtgtgataatttggtcgagttttgtgggtatgaattatgttacggaggtgcagttgtacgaggaggctgatgctaaatatctcctgttatacactaaaaagaagaattatttattatacaagtgggaaaagggtttatggattaacataacaggcacgctcgtggatccacagaaactaacactgtaccacaagggaaatcccatagacaaaaataagctaaacttatgtattcgtgagtttagttgtgaaattattactgagaggttgagttacaggttgactgaggggttgactgagatgtgtgactgtgtgtcgtatgacgggaagtgcctgtggctcaaaacaagagagagattagcagctgtagtcgtgaagatactggagaataaagttaatttattcttccaaaacgggaaagtctggagatttcaagtcgtagaacacatccccaaactcatcaaacaaggatactcacactaccaaactctttaatttatacttttcacattgtttttagctattaacagtataatattctattactttagtataaaaatgtgtaaaatgtgtaaaaatgcgtgtaaagtgtgtaagtgtgtaagtgtgtaaaagtgtgtaaatgtgtaaatgtgtaaatgtgtaaaagtgtgtaaaagtgtgtaaaaatgtgtaaatagtgtgtaaaagagttgtgattgtccactggtggttaagtgggcatatcaaagatatatcaccggaggctcaccggttcgaaaccccctcctaccaacactattaccattaccatactattaatatactattactatagtatagtaaataatgtgtagagtggtataaaataaggtgtttgattattgtctgtatctcatggcgagtttggagagtagtttgtgtaggtggttggttgtatcttttgtgtcatttacaagtccttccagtaaatacctcctcatcttctcattcgatattatctcacccggtaactcattcaatcctgtgttcatcagttccgttacggtgcttggtccagcactcctcatattatcctcattgtccacaatatccccaatattcatactatccccaatattcatactattaatgttgtgtgagtaaaactgtgtgatgtatttgaatagttgttggatgtggtgtagtattgtgtgtgatggattattggtcaggagtgcaaaacagttgttgacggcttgttgcacgtgttgcagcactagtggtctgagtctcaaattattcctcgaaactctcagcagtgagaaccaaaactgaaacacatttttacacctgagaaataagaattgagtgctaaatttgatgatctgctggacggtattgagatcagttagaaactgatcagtttcgaggaaaaactcggcctggagaccgtaaaaatcctccactaggagctggtccacaactccttcactaaaccttttcagtgtcagcactgtcaaaacgccgtaaaactgtaccacagtgcccagggtgtcaccgcagccgacggtgtcactggtgccaattagcagaaatagccactgaaccacgtataaatatgtgctaaaaagtttaacattagctatggcgttgataaggttgactaaatcaccaacgtgtaggagaaaactgtgtgaggaaaccctggccgtgtgcttgagacaacggcaaattaactcaaccatttcctcgtccaaatgatacttatgcagtaatctgagcaacacaggcgtatgatcagttatcacacgcaaatcagccctgtcacccaaattacgcagaaatcccaccaaaccactgagtaattgggttgtatcagaggggtccaatgaggtattgagagaacccttaaaaagtgtattatacacgtggacgatcatgtcgctggtagcgtttttggtggtgctggagatggcttctaggatcattacggtgttgttcagattgctgctaatgctgctgatgctcatagtactctgcagtaaattgaacagttccaaatttaacgtctgagtttgacacagtttataaatactaccgacactttccaacaccaatctttcaccaaacctaccgacacactgagttaacatgtggttaatcatttgtatgatgggtaatagggagtccctggtgattgatcttctgattttggcgaagaaggagatggaattaattctgaagagttggaagagttcagagtctgagttgttttccagaatcttaagcagcaagttaacaacatcgttgcatacggtacggtccatactgacactgggtaataagtaaagtgacgacattattaataatagatttttaccgtagtttggtgttgaaagtaagttatttacaagctgatacgcctttgtaaagccaattacgcggtaaatcacgtcatacaattccaacaccaagtccacatactcctcataaaactccaccaacaaattgatgtcccccgtactattatacggtggcactgttaacaataaaatactactgaccattttatccacaatattgagttcatagttggataaatcgatgagggagtgtgtggcacgtttggagatgtggtagagttgatcatcaaagtgtgtggtactggatttattttcgagtacaatttgtctgcagtgttccctactgtaatctgacttaaaagggttaaaaccgggaaactctttatacagcagcaaataaggaacctcaataaacttcaccaaccaatccaccaactcatccccaggctccaccacatttaccagcaaaagagaaatattatcaaacagaaatgtgtccgcattttcaaatcctgtgaccagctggggttccaagttgtataacacattttttaacgttttttttatcgtgtcaaatttgttcttctgtgtgttagtgtgtgtgtgtgtgttggtgtgtagaaagtgtattagagagtctatggcaagttcgtatagctctggagtattaaggctgggattttggataatttcaatacaatgctgcagtaataatagttcaaattctgttattgtgtcaatttcacaattcgtgtaccaattataccaaaccacaattaacttacccttttccaccactaaattattaattaattgaattgatcaaatttaacaagatttaattacaaatttcacgattttaaaaataaaatgccagaattgatcgggttacgaaaataaattttctcacccctaacttttgctgcagtaaccacttatttaccaaaaaataattccaaaaataaaataaataccaaaaaggttgcaaaatggataatatctggggctgtgtaaataagtaactaggtaggtgggagtaaataactaaaaatctgtaaaaattacgttgataaacttcattgaggaagagtagtacggtgtgatattgtgttttaattgcgttgttaagtcttgattgtatgtcatttgtgagtagtaagcgattattgtttgactcttcggggaacagttgcagtaggagtaacacattttcaagtgttaatttattacttttataatatgacacgaatgttactatcggagtttcccactcctctatcatctgaatactcatgtcacacacactcaacaccacactattcaacacgtttttcctaatccaatcatcagtttactcagtttatatcaattagtttacataaattatataactaagtgaggtacggcagaggctgaagtagtagtgagagaagagattggcagatattactgagagattcacgaggtaactgatagaaatcgtacagtatcttcagccgcaacgtctgaccagctataaactttacctacaacacgctacagggttatagtcaggtgttaactaatctacagaactatagtaaacaacgtaagaatgtgagaaatagtgagaaagtacgtcgtttggaaggtttgaggtgagaatggagtgggattcgttccaggcttcctgacttcgctgccatttcatcaagttctcattcctacaaacatatcaaacaccaagcagcaatttataccatagctatatactacactaaagggtaattaatactatagtaatgtggtatttagggataaatgggtagagattggaatacgcgagatgttgtagatgtgtattggaggaatataacaaattattaatttcgtcgactattgacatttttacaattattcacatttttacaattatttaaaatttataattatttacattttttataatttacaaattttctacatttttaaattttaacttatctccctctccctccccatccaacccctcaaaataattattaacaataataaaataatataataaaataatataataaaataatataataaaataataaaataataataataataaaataataatataacaaaattatgagaggaagagtgagttgttgagagtgtgtttgaggaagagtatgatggagtgttgtatgattcctcggaacgcgtcggtattgagaacggcgtcggggttaaaaaatgacaacgacactcccttggaaaataaacattcacactcgcaaggatcgacttggtccagctgactacaccagacaattctcccgccgattccgcaggatagtaacacttgcctgtgtaacgtcatttggtctgtggaaaacgctgtaacggagtcttttaagattagaataccactggcgccgtaaccgccagttacccttaatacatcactactcaagtcttcacaacgcaaactcctcaacattactacacaattgttataccccattatttatctattttgcaacctttttgataattatttaattttgttaattattttttggtaaataagtggttgaagcagcagatattgaggggtgagaaaatttattttcgtaacccgatcaactttggcatttatttccaaaattatgaaatttatcaatatttttagataaaataagatttatataattgagtaaatagtggtgaatagtgtgggcgttactttgttgtgatttatttttgaatgactggtgtttgaagaacgggtgtcgggaccatttcgataaaaagttctcgtcctaatcaacaatttaataattattcgtacagtttttggtatgtatacaatcacatgcgcgtttttcagtaatacccactccacataccatatcgaatcctcctacaatattcacaatattcacactattatttagtttactaagttaatttgagactagtggagataactaatgagactagtggagtaatagttaacttatgacagagtaaaccagtgtagagatacccaagagggagagacgatgacgattgtttcatgttcatttgtctttaggtataagtaatcacctaaaccagtaatgtaatgattaactatgatagttacataaaagtgatgtggtgagtggtttgaggttattgagaattttgggggtgagtgtaagttctggaggtaaaattgacacttggcttatcggctgtaattccaacacatcagatttcaccacactatccacaccaaccagtcctacacacaatagatgaattgtgttaagtaagggtaaatagtgtgtaaatagtataaatagtgtgaaataatagtagaaatgtgtaaagtgtgtgtaagtgtgtaaaatgtgtaaaaatgtgtaagaaaagacacgttagtgtcgaaataagacacgtaagtgtgtaaaaaactaaagtaagggtaaaagtgtgtaagaatgtgtaagaatgtgtaaaaatgtgtaaaaatgtgtaagaatgtgtgattgagtaccgatgacatgtttatgattccagttatcataagagtttattacttcccctatggaaatattatttagtgagtttgatgatttgttatcaagagtatacacactgctaatcccacttcaaaaaatttcacttttttcaccaaatttcaatactctcaataccataacaataattactatgggtaataactatgtgtgtaatgactacaatgagtaataactatgtgtgtaccagtgaacgcatcggaattctgagtgatttggtgtagtttaatgttaataaattgttgcattagtctaactgtggaacgggaattgagttgtttaaatcgtctgtaggtatgactttggttaacattttaaccatttcctcatgttcctcctggagtgtttgttcccttttagtcacactttgctctcgtaaatattttaattccagctgtttatctattagaaatgtgccagtcactatgatactcagcatcacagccaaactcgggacgccaagcgtaaaaaatccactccgaccgtcaaatctcttcaatcttttaattaatctcaccaatctcataacaatacaaaataattattttactgtcaggggagtagtattctagggaggggtggtgtcaacttgtgttacaatttaaagtgtaaaatattgtaaacaactttatgataaaatttgatgataaaattttatgagaataatttatgtaataattttattggagagtgttgtgtttgtggaatctttgagaaggttggggtttattggctttgcacgttatcccttacacagtgctgaattccctggtattctggcttctaaatcctcagttagagggaaatttttgaataagaataaccaattctattctagaagattaagtaaaattttagctaaaaatgatgaaaaacatgaaaattcagcctccgacgatcttttcaactgccctggaatcgatcatatcttcagtaaatcgtaactcacataattccccagttataccaaattatcacacagattacataattatatacctttatataacatttgttgtcacgagtttacacattttttaaccctcatatatccacaattaacaattattaccttatacaacacaatgtattggtgttagatatgtgttttctggtagttttgaggatttgggtgtgaatagtatactagtgcgtgacttggaccataggaagtattccctggaaacgcataaaggattaaagaaagtaatcgcaattttagtctctgcagttgccgtaggactgctctacaaattcgcatcgttcctcaaagacctcatcgaacaacaaaacatacaattggtatccacacaataattctagggtttatcacttatttacatagttacgtactattagttggttaaggagttattaatgttttagaacacgggacatccactgtataatccaattaacacactggatcaagctaattaacacactggatcaagcaaattaatataataacaagactacatgctacttaatattatagtttgtactatagtaatactgtgctaaatgccgtaaattcgagggttaagagacataataaacacttgatatagttaataatatagttcaatatatagttaataatattatatactatgtattatgtagtatactatagtgtatatacacatgtataatactataggtatagttagtatataaggtatagtattacgtgtctgggtttaagagtatagtaatagtatattatatatagtatagttattaggtatattatatatatttagtagtatagtatagtattcttaggtatatagtaaagagtatagtaagggtttggtgtctgggtttgagggtttagtagtgtagcaatatagttaagtagtattatagtacagtaatagtattaagggtattagtagtatagtacagtagttaagagtattatatgtgattcacgtatttaatgtatatatagtaacagtatagtaatatactaagtataatagtagtaatactatactatacactagtactaagtatagtactacaggtataatattaagtgtctgggtctatatcttgcgatcttaaaacaccaaaccaacccctttaaacactaaacaatgactaaattaacaacttaaaacacacaataacaactaaataaacaacttaaaactctaaataaactctaaacaacgactaaattaacctctataagcagcaaattatgactaaactaacgcctttaaaactctaaattaagactaaataaacaacttaaaaccacaataacaactaaataaacacataaaaactaaataatgggtgtgaatgtaaaatgggtgtaaaaattatggtttgatgtgataccactgtgagaggacattaacaaattccttgtatgcaacgtccagatcttcgtttggtagtctggcatcgaagtagcaatcccttgactcttcaagttcctgattagctctttcaactcttttatttatcgattcctcagtgttgcaacctcttttaattaacctttcccttaagatttcaagtcctggtggctcaataaacacgccctttaacctcaaatttgcatctaacagttgtttgtagcctttaatatcaatttccagtaccgggactttgcctagtttttgtatccgttccagctctgatcgggctgttccatactgaaatcccacgaaagttgtaaactccacaaactcgccgtcgacgtacatttgatcaaattcctccttagacacaaagttataatgcaccccgtcacgctcattcggacgcattgcacggcttgtataactaattgagttctcaaatacctgggggtaatcctcaattaacctcgcattcaacgttgtcttaccagaaccagaagggcccacaatcaccaaaatcggtaaatcctccgacatccgacaacaccaccgacactcttaaaacactattgacagtgaatacacaattattactgttgacaggggtgatattgtggactatgtgtaaaaactgaaatttatatagtaaaaatattaactttaacactaatattacgaggtaaattagtgtataaaagggataaaattagggctaaagggttaaaattaggggtaaaggggcgtaatttggaaacaattcggaaaataaaaatttcgttaaatttgagaaaaaattaatataaaacattaaaaataataaattaaagtacaaaaggggtaaatttgggcgaaaacagtgaactgataaatttgctcgagtgttcccatacagcctgacgattcttcaagacataaatttactaaaattgttttaaactgttgtcttcttgtttacttgtctgattagaatttatgttgtaatttcggataaatccgccgaaatatttaattggaagactaacctcggaatctctgtaaaatatctcaacatttccagatctcaaaattcaattctcatcactcatctccccttcattctcacaaattttttctatctttacaattttttttatctttacaattttttttatctttacaattttttttatctttgctaatttcttttatttccgtaaatttgttcaattattgcaaatttgttcaattattgaaaatttcttttatttcgtaaacttgtttaaatcttgaaaatttctttaattcttgaaaatttctttaattcttgaaaatcgtttaattgttgaaaaattgtttggtgaaaaattttatttttcataattgaaatttatgagagataaaattttgtccctgaattggttaaatttgttcattttcctgtaacatattaaaattgcccaaatctcgcagattcttcaacaatcccacccaaaatgtacaacgataaaagagaatctcgtacgttccaaccccttagttaccccttaaatagctttatttttacccttattttagctgtattttacccttaattacccttattttagctgtattttacccttaattacccttattttagctgtattttacccttaattacccttattttagctgtattttacccttaattacccttattttagctgtattttacccttaattacccttattttagctgtattttacccttaattacccttattttagctgtattttacccttattttacgcttaattagtcttaatttagagctaatttagtcattttaagcttattttagtactattttaggggtaatttagaggtaatttagtactattttagggctaattttacacttattttagtgttattttggtcttattttacgcttaattagtgttattttacctcttaaatagtcttaaattacttcttaaaatccttattttacctcttaaatagtcttaaattacttcttaaaatccttattttacgccttaaaatagtcttaactgtgtcaaaattggtgttaaaaaactttgtatatttgtttgtaggttcgtttagtaagtcgtttatgttgtatactccggacgatgcttatttgttatctggtcgtgagggttcgaggtccattgaccctgagaatgcttcgaattattcctttgagaagaagccttccagggataaacaattcttcacttccttcgataagaaaaccttaaccttcgatcccaagaccaaattcaaaaaagctctcaacgccacaggtccgttacggggcttgtacccacttagttatttctagagttattcctacagagttatttctacagatagccaccccgatggctctctctttgtcatccagactccctagttactcagttattgtagtattagtttatattattagctccctttggcggtcccccgcctcactactatccgggccagtccccgcttgacttggctattcacattagatatgtatactccactccactatcttaacttattacttcataatattgataattgtttagaccctttgaagcgagtgaatagtatgtactctgcgaagagtgtgtatgaggagttacagatggccaggcgtgtgaagttacccagtgtcctccagagtattcaccatgtgttaacagagtttgacgactccggagaagacctctcaatgctcccccaagtctccaaattcctaccacacatctgcaaccacaaactcgtcaaaatcgaaccacaactcttatacactcagtcacactctctcaagtcgaattattcaatcaaatccaatcactctaacaaatcgaataacttaattaaatcaaataactcaatcacaaagtcgtcacattcgagtctgacagatttaagttcaagtcctgtgccaccaaactttacccctctgaaatctcaacttgaaaaatccgacaaacccagtgccactcttgaaaaacccagtgccacatttgaaaaacccagtgccactgccacacgtgttgacagagtgggcagagtttacagtggtccattgaggatcggtttgatcttgagtggcggtcctgcaccgggtggtcacaatgtgattgctggtgtttttgattacctgaagcacaggaatcctgaatctcagcttattggattcatgggtggtttagacggtctgaaatacaaaaggtaccaaataatcactgaggaccagatggaccagtaccgaaacctgggcggttttaacatgttaatgagtggccgtgggatgatatcaacaaaacaagagtttgagatggtgttaaaaaccgtaacggagcttgagcttgacgggttaataatcgtaggcggtgacggctccaactccaacgcagcaaacatcgccaactacctcgcgcaacactatgaaacccttgacaagtccaaacacagtagtgaaccagttgaaaaggagaaaagatgtgtagtggttggtgttcccaagactgtggacggtgacataagatcttacaacattgagttaacgtttgggtttgacactgctgctaggacttactcagagttaattggtaacttatgcactgacgccgcttctactcagtttaattatcattttgtccgcataatgggcaggagcgcgtcacacctggcactcgaatgcgcactccagacacaccccaacatgctactcataagtgaagaagttagtcagaagaatatttcactccagcaaatcgtagatgacattgtcgacctcatgcagaaaaggtatgaaatgggtaaaacattcggtgtcatacttattccagaaggtctcgtagagttcataccagacttcaaagttctcgtcgaagaactaaacaacatcgttctacaccgtactgatagtgttgacaatgtaaatagtgtggaaaatgtggaaggagaggacagaagtgtgcgtatgtttgatgttggaaggttgaacaggagtaaggagacgtggaacttcttgccggtgaatatccaggagcagttgctgagtgacatagagtcgagtggttcaattttagttgcgaaaatagccacagagagtctcctgagtatgctcgtggaggcccggattcacagtagaaaactcgaccacctgcttcagattattatcatgacacattattttggctacgagggaaggtgtgccataccctcggaatttgactcgtcatactgttattcactgggatacaccgcgtcagtactcgtggcccagaagaaaaacggatacatggccgcaatcagagatctcaaaaatgatatcgaagactggataccactcggaattccattctcacacctcaccacactcgtagaactcacacacactgggaacgtagtttccagtgccaatactaatactactaatagtaacactgccaatagtaatactactaatagtaacaatggtaacgcagtaaataaggggaatagtgtaaatagtggtgtggataactgcgtagatccacaccgtaggtatagatgtagtataaagaaaacgttgttggatttggacggtgagttatttaagacgtttgagaaggtgcgggacatttggaagtttgaggatttgtaccgtagcccggggccgatacagctcacgacctcaagtcatctctccaactccgacctctcactctacctcaacacctacgaacatgacagaaacaacgaaaacggtaacagcaacagcttcgccagtgataacaccaatggcctcaccaatgggtttaccaatggatattctaacggatttaccagtggatattctaatggatttggtaacagatttacaaatagatctacgaacagatttggtagtggatatggagagagatttggtgagagatttggtagtggatatggtagtggatttggtgagagatttggcagtggatttggtagtggatttggtgagagagacgacgtgagtagttgtagcggtgcgacgtcaaatgactatgttgatgaggaagagattaatgagcggcggtgctttacactgttgattcccacgatgaaggaattagtcggagattatcccttcaatggtacgttacggggcttgtactcacctagttatgtagctacagagttatttattacttagttttttctacagatagccaccccgatggctctctttttaccctcaggacttagtttacttactcacttatttactacttagctccctctccctctcccctatatagttaagtagctccccttaggggtatatactaaattagctccctcttggggtccctttttacctgaggacttagttccacggttaactatttagttatttggttatttaactatttaagttttcctgcggacctttctccgtaacggagcttgctcacacatctcttaattacccactccaactttatttacttactatttccctaattatcccctccagaagctcttatttatcccttacacatttactcttagtattattttcttcccagttactccttatacccttactagaatcaccctataacccttaatacttattaatctgtaatacatagtattattctgtaatgcatagtataataatgttataaatgggataaatatgtgtttaggtgactatgtgggcttgaggcgtaaggacaagagttttatgagtgagttggagttgaggaggctggaggtgatcccggacatcccgatcgtgtgctctgacgttaagtccaggctcgtccccttcaaacaacacgtcgaattcgaccagtacatcaaaaaccaaatcatgctctactacccataccaacacaaactcaaccacttcaaccaatacgaactcgttcccaacaccattccaaccggtaacaccccttttccctctttttactcttaattagctttattttacacttattttagccttattttacccctattttagctttattttagggctattttagctttattttagccttgattagtgttatttttaccccttaattacctttattttggcctattttagggttaattttacatattttaagcatattttagaggctatttaagctatttttagccttatttagccttattttagctgtattttacgcttatttagccttaattttacccctaaatcacccctaaataccttaaattctaccttattttacaccttaatctttactctaaatgtttaggaatgggaaggcgtgagattggatcagtatcgtctgagagtttgaaatctggttcccttcgggttggtgtggttcctgtgggtaaacaggcgcccggcgtactaaatgtgttttggggcattttcaccagagtctccaagatgggcggcaaatgcttagcatttcacggcatcaagggtttactgcagaattcatacattgagttaaaagagtcagacttcgagtgttttagaaaccagggcggactagagttggttctgaggtctaaacgttcattcctgtggaaacaggacagacttgaatccgcctacaaaacttgcacagcgctggatttggacggcttagtattcctgggcgacgagatgagcatgacccaggcctcgtttgtgactgaatatttcatgtcgaggagtagtaaaacttgcgtaattggcgtcccggtggccggcgggaattccctaggcggtgatctcatagaagcctgcgtaggatttgacacaaacacaaggatctacgcttctttagttgggaatgtcctgaccgacgccatttccatgccaaagtactggcatttcgtaaagattctgggcaggttcccgtccgtagacgtgctcgagtgtgcgctccagacacaccccaacgtcgtaatcattgcagaggagtatagaaattcggataagagtctgtttgacattgtggacgaaattgccaacgccattgtcaagaggagtaaactgggcaaaaacttcggcacagtgctgatcccagaccacttagtgctgcacctaccaagcaccaagaatatgctacaggaaatcggcactgcactcaccaaagccaaccaaaagaaccaacgcaaacacgccatacaacaactcatgtcatacaacgtctactccaccaaccccgttaacaccaacaacactccgaatgtaacatccaaaagtgtgagtacaacagtcaacactgctaatgtaacagtaaaagatgtgaatgtaacagccagagatgagactgcgaaagatgagactttaaaagtcaacactgctgatgtgagtgcgaaagatgtggtggtgggacctagcaccgacacggaggaagaatatgtaaaaatgataactccgtggagtttggcgttgtttagtagtttcccggagtacataaggaaggaaatattgaacatggacttctcagacttgggcctggagaacttggaaattgaagtgatgttggcccgtatggtaaaggaggaactgtcaatccgtaagaaaaagggcgaatacaatggcaactacgctgctgtgacgcattattttggttaccaaggccgctgcgctataccgtcagaatttgactgttctctggcgtatagttatggccacttagcagcaatttgtgtcgagagtaagttaagcggtttctgctgctcaataagagcagtttgcggtgcagttaaggactggaagttgtttgcaactccattcacttgcatgatgaaaatcgcgccagactcattcaaacttctgattaacccgaagtctgaaatgccaatcatcccgccaaacaacgtcagcctcaacgggaaaccctttaaaaaactcaaatccgcacgtaaaaagtggttagtggaagatttattcaataacccagggccgatacagtttaactcgtttgtcggcacacagaacatcatgctaatcattgaacactcacagtactatcacatgatcacatcagtggagaggttcactgaaattatcaagaatatctgcaaattcggagtctccgaagagtacctacaccacgcattcatacaactctggggactcatcaaaatcacacaagacaaaaaccaactcatctcactctcacaagatttcaaacttctctaatatcatacatagtattatatatattatagtatatatattagtatggtaagggtttggcgtctgggtttaagggtttaggtatagtaattttaggtataatataggtatactaagcgtatttacagctgatttacagcttaattaacccctaaattgcaaattttgtatgttttggtaagaatgtcctggccctaccaactccctgtgcacccctttgccaacttgtgctaacacactaacacttcatataatcttaaactgtgtgtgtaaccatgacaaacgaagatttgaagtacaaaactgagttaataaacggtaaacctgtgctataccagaaatctacacctgactccggctgggacgacataacacacacgagacataacgttgaccaacttgaattctacgactatgatctcaatttaaccaaagtctcccagtgtgcaacaaagttatctggtttcctgtttaggatattcctgaatatcatttgtctgcacattaagctgggagacaagttgatttggaactactacgcctcaaaagtacgtgcaagtccattagaactccttttcaacctcaagagaaacaccatgtgcttattccttaggggaaaaggtattatcaagttggacatgaatgggtatttgaatgactgggtaaaaccgggaagaccactagagaaattcagaactgaacgaataatcagagatggaaaaagaatcataaccttaattggtgaagatgaaaaacgtgatgaaattatagctagtggacacacacttcataataataaaccaaacagtccacacaaagttgcatacattctagataccgaaaccggagaaaaggaaattatcatcaaatattattctaaaactacttaatctcatacagtatataatatatatactattattactatactatagtatatatacatatgtatactactatatgtatagtactataagtatatagttagggtatatatagtattatatttatatatacttaatgctatttatagtaatgtagatgaggaagatctagatattggatctagatcccacctaataccatcctatttcctagatccaaaacaatattctacaactaataactaataataacaactaataataactaattaattcataattgacttgaatatataattttaaaaatggtgaataatggatttccgaatccttgtttgaagtactctcacttgataaatccagtagcgttagaagtaacttgtaaaagttctaataaatactttacatatcatgagaaggacgacggtggatattactctagaaatgatttctttgcctgtaataaggtattaattgcgaatcgcgtgctgtggcaaactgacaatgaggaagattacataggccaagtacatatttacactaagaataataatattcacagtatcactctgtgtttccttaacggagatattaaacatttaagtaaatttgaaaacaattacatagccaagaataaaatcagccttaccatcaaaactgatctagagaactcaggagtgtatcaaaagtacacaattaacattaataccgttggcagtatgaagtttataaattataaaacgaattctgtgtatttgttcaagagaatctacgaatccggagagctaatttggaactcgaaaagttactcagaaagtggaaaattcgtctcagtttgcgtcttagatcatgaaaaatacatggcaatactcttgactaattataattacttgctatttcactatgacaatggctggaaaaacatcacagcggagatgttaaacttatcaaatttcatgttaattttcaatattaacagcggatttaagaagtttaagaatgttaaaatcgattacgaaactgatttaacgaatttggagtactcactcctgttcaaatttgagcctgaatttgaccagatcttagacctctcaaagcccaaatgcttaacatacaatttactaactaatgagttctttctattactctgtaatggcaataagataccaattgacaccaacaaagcaatgatcaagatcccaatcaacgccgtgaattatcatcttttcccaagcaaatcgttctcagaattcacctttaaaacggccagtagtgggatttcaattaccaacagtgtaaactctaaggatagtgggatcacaagtattaacagtgtaaactctactagcagtgggattacgagtattaacagtctaaactctagagacaatgggattacaagtattaacagtctgaactctacaggcagtgggatcacgagtattaacagtgtaaacgctacggatgggagtgacggtgataaaaattgtgtgtctgaagatcaatatttgagtatatcaggaagcgaagatggcagtgaagataaaagcgtaagttatctcactaacgacgaagttatcaaggccctgagccaagtcattcaatattaaccaaaatttcaagattttaaagatttacaaaattttataatttttgagaatttttcaaatcattttgtgaaattttaatttttcaaattttaatgaaatttagccatttttaaagaatttaaagaaaatttaattttactatataatacatatataatatagtataaatagcaatatttgtggaaggcgataatatatatatttgagaaaaaaaacaaaaaccgattttaccactggaataaacttaaaaattaaatttaaccagaaatattaaaaaatgtgtaaaaaaatattattgtcctaacttttaacaaaaattaagttaatttatcttttcccaaattctaaccacatcacacctaatatcaattccaccaaaccgttaacactttaaaattattaacactttaaaattattactctatcaaacaattaatgtgtaaaattattaatctatcaaataattaactttgcaaaacgttaaaacgggataattctgtaaaaaatgtcatcttctgggttatcgatgttgtatgagatattggtttcggaatcgaagtatgagtctcggggtgtggagtaccgttcaaggctgcgtgcgctttacaatcagatgttacgggagcatgagctccaccacgagcctgtgtacaaattaactaagcagtgcagtaacaagtttgtggaatctctgagtgagtctgtacgagtcttagatcctacagaagtccagtctacagatttagaactttgttacggcgtgcatcagtatgtgtttccaaagatccccgatttaacagcgttagattaccaatttctagacaagtggcacaagttttacagtaacttgacacagccacaggctgaacggagaatcaaacgcacctcagagaaacagaaaacttaccaaatgatcaagcggagatatgtcagagactccgaatcatcctctgaatcggatgaatccaacgttaaatctaacgaacccgttgtgatcaccgaggcggatttttgctcagagaataaagttaatactgtggacactgtagaaaatactgaaacagtgaccaaagatgaaccggctgatgataataagatggaaccggatgatccagagctagagggtgaaaaattggaagactcagatgtggttgacagtaacgttgtgatcccgataataataaataaggaagtggaaatcaccgatgagtccatagtgtttggtcttatggacgaggaaaagttaaacgactgggtctcaaccacgtcgtttgatcattacttagaactttttaagcttatttatcactgtgacaatagtttacagagctgtgacgtggaacctgaggttactcctgaagtgtcagaagtccagagtaaagttgacagagtagaaacaattagtataagtcagaacactgtgagtagtaacagtagtcttgacgatgtgatgattgggataaacgacttttacagaaagagtaaccctgaagtcttacccgggaattacacacacaaccccgaacacttcgatcccaactccatctacggtaactactatcttcctcctcataatcactctaactctatggacagtgttaacactgtagaaagtgttaaccctatggaatctgtaaaccctgtggaatctgtaaaccctgtggaatctgtaaaccctgtggaatgtgtcaacaaggtggaaagtgtggaaataatgagagtgaaaagttacagtataaactttatggaggtgaatacgagttattactatagtgatgcaggtttatttgagttggattgtaatgcggtgattagggagccgtttatatcccggataatgcgggggaacatggaggagagtacgggtttgtaccaggagttacaactactgttaaaaaagctcttttctctcaagaggaagattactgggaattgcccggtctgctcaggctggaacttgttacacgggatcgcaactacgttctgtgaatactgcgaagataagttagctaattcagatcccacattgctgctgagcatgtatgagattagacgttacctggtctccacagtgtatccaattgtaggatacacttataacactgttaacctgttcactaatggagaattgagtaaaaattggcttacagagttacggggacagaaagtgtcaattcagtcgttgaccagtgttgggtctacatatcccaaagcctcgttacacgatggcagaacactgccaaatcccactcttctacccaccaacatctgtcacacaattaatacctttcagttcccaaaatccaatcatatacatagtgttgaggagggggacacagatgacagtgtgcacacagatgatagtgttgacactgaggaagaagagtttagggtgaaatcggaggttgaaacgccgaattatgcctacggcacctccgagatgaactacacgaacaatattctcaacactaccaatagtgtaaatagtaccaatagtaccaatactattaatagtgttagtagtgtgaatagtgtgaatagtgacggtaagatgttgttgtatggattaatggacttggtgaattacaggcgtgtttgtaggggtaggttactgaacaatttctttgaggagattttcaacagttttcactcgaagctgacatcgcaacggtccgctaaacttgtcaatcactacaatttcatacttaaatctggattactcccgtcaaactctcaaacagactgtaatactcaggacactacggatagttcagtggagattaatgaggcggtggatgaccgagagtattatgatgataatgtgtcgtatgtattgagtagactaccgctggacacggatttgataaagttgtcattttaccaccggggcatctttttatccaagtccaacaatctcaaaactctcaacttcctacacatcgggaaactcttcggattccacaatactaaccctgtgaacaatgctaatagtgttaataatgtgaatagtgttaacaatgtgaatagtgttaatagtgtgaatagtgttaatggtgttaatagtgtgaacagtgtgaacaatgttggtggtggtacagaactggagggtgtggagttggatccggtggacagtgtagattctgtagacactgagagtaaatcagtagtggattcagtatgcacagggttggattcactgtgtacagatgtgatgtataattacaactggcatgagatgttacatcgtaatttacacaaggaacattatctccacaccaatcacacaccaaccaatcaaacactcattaactcactcaccaatagtaatagtagtgagtgtggtgaggaaaatttggagaatgaaagagtgagggagttggtggaggagatgtgtgagaaggaattactggagaatatgccgacaccagtactcaagaacttcatcacaacaagtaactaattactatagttaatatttagtaccattactgtactatagtactataatatttatagtatatacttaatatatacccctagagggagctaattaactatatacccctagagggagctaattaactatatacccctagagggagctaattaactatatacccctagagggagctaattaactatatacccctagagggagctaattaactatatacccctagagggagctaattaactatatacccctagagggagctacttaactatatacccctagagggagctacttaactatatacccctagagggagctacttagagaagagggagctacttaactatatacccctagagggagctacttagagaagagggagctacttaactttactctttactagtataatactgtactatacctatgcttggtactatatttgtttgtagaaagagtgcgtattgggtatcctacgagtttggagatgtacatgttgggtatcccggactctataatggactctggtatgtacgggattggtaagggcttttcctactccttggaaaatgttatctacaacctcgcactgctcagctccttcatacgcatcggcaccgtcaacaaacacaagaaagtcaaataaatttttttacccaattctctaataagatgtagtattaatatattttaaggatttagactacacactacacatttttccacatactaataactttatactataaaaatttttataatataaaatgtgttacggagttgattttctggaagaaacttcgggtctaaatgtgtaaagtagttggcaagattttgcaggtgtcctagaactagcacttgcagaataattactcagtaatgttgaatagtattaggtgagttagacgtttaatactgttgaaaacagtcctcacgtacaatttcaatattttacacacaaatacttggtacatatgaaaggaaactcaggactttacttacttagcttgagcacagctataatatacacagactagtctttacatactaatactactaccatttactactataactatatatactatacatattatatatactatgtatattacactatatatatttatggtagtagtatactagggcatatacagcaggttctagtaactatacacaacacttgctaatacagttaacactgtttaataccgttaataaacactgtaaatagtataatagaaccctgtaaacagtattataccataattaagatacacaatttactagccaaaaacactaaacccagacaccaaaccctaactatactaactaatactatataatagtgtggatatattattgattaatgagatatccaactttattcttttttttattggttacactatctgttggttctagtagccatttacttttactgtttattactcttttcttctcttctaatttctccaactctttttgtttatccagttgtattttagcttcttcaaatgggttactgtacacaattgtgtttacaattttcggcgggtttagaggtctttcttcatcgttgaccttgagattattccattttttgagtatttctaaaccgcctacgactttcccaaacactgagtgtctattatccaaatgctcacaggtgttaaaagttatgaaaaactgtgagccgttggtgtttttccccttatttgccattgacaccacgccaattcccacatgatacaaagtgttatcaaactcatctgttagatattttggtatcacctgtgaattgtcaggcgagttcaacttgttacggcggtagaaagaagactcaccgccaagtcctgtgtttgtgggatcaccagtttgtatcatgaaatcttgaacgcagcggaaaaactcacagccgtcataatacttatcctcacagtgttgcaggaagttatcacaagtcagcggtaccctgtcagtatgtaataacaaattcaagtcaccgtccgtagttaccaactttacgtaacccttacgtttcatcttttttacgtagtcgtacagaggtaatctcagttcaaagacagttttgtcacggaactcaaccttgtaactgggtgccacggctgtggacgtgaaacttgcagcctgactaccagtagtaaataactcatgcttaggcctataggagggtttagaaggtttaaagattttcaaatgctcttccaacaacgtgggttttggatcggatttcgtgtcggtgtccgatttcgtttcggtgttggtgtctgagttggtgtgtttgaggtcagattgaggtgggttaattttatccctggaattggtagttttaggtttaaaataagagttaatgtgtttaaaagtggaaatagttcttaaagctgtgttatgaggatcttgtattgtaattatatcattcttcagaaatccaacccctacaacagaatttagttaaatttatcaaaaataattaaaaattcggtgttttaaaaataaaatgccaaagttgatcgggctagcaaatgtaaattttctcacccagtcatttctgctgctgtaactacttatttaccaaaaaacaattgtaaaagtaaaataaatgtcaaaaaggttgcaaattagtaattagtggggatgcgtaagtaggtaactagtatagatatgagttagtaggaaccgttgggacaaagatagagccatcggggtggctaactctgtagaaactacataaataagtaataaataagtgagtacaagcaccgtaaaggaaacctgtgatgggatcatgcatgagtccgtcctgttcctttttagcaacttctttaagtgtgttataggagtaaacattccccgagggtttaacagctacgatatgtgaacttggcgtgaacctcttgagcgacaatgggcactgaaaatgaccactctgatccttactaaagtatattggaaataaatcgtctaaagctaattttgccccgttgacggggttaactccgtgagaaataacaaattctttaatcttgtcatgatcgaaaatatgtccgtctatagtacaaaaggggttagaaaagggcaataaagttaaaaaacaagaatctaacggcactaactccgccggcctgttactcttcacaggcgcctgagttaacgctaattcactcggtaataaatataatttatccttactatgcctgtgcttactacttaccatgtaatttttcctattatataattaatatccgtggaaggctggggtactccaacacattctaacacattgattaagtaatttgtaatataatttgtaatataatttaaataatttgtaatataatttgtaatataatttaaataatttgtaatataattttaacaatttgtagtataattaattgtagtaaatatgaataaatatgttgaaatgtgagtaaaattaggattgtggtaagatatggaatctcgtctgtaatgtttatttttcgttatttttcgttatttttatcttttttacccgtaaatacgcaatgttttaatcatacaaaatttaaacccaattcctacaacttttgtcaaaatctcaatccataccctaacacattataccctaacggattacactctaacactttatactccaacggattacacactaatagtttccaattccaccctgtgaactctgtgaatgttggcttaaatactgctaaaactggtgaaaagggtgtgaatgtgtggagtttggggagtgtatggagtttgggtagttatctgggatttgaggacccgttgatatttacgcagtgtttagagccggggaaagaggctgagataacagtctcagagagccaaacgcacggaataaacaaagtaatccacgatgtaacgaggaggaataatacgaatcagcccctgttccccgtgggaacaagagtttacgtacattccggaccgtataacattgattacattatcctttcttaggttcaaaactattcgcgggaccgttttattcaatcgattcacacaaatcgctaaaccataccaagtaataatatacacatacacatcactacacatccacaactcttcctatcctaaccatactatagattacagtagttatctggttaactatggtatagtgtagtatgatgtgtgatgttgttgtaggtattggtatcactggattgtagaaattctgatggattattgaggtcgaacgttgcgagatatcatggcaagagtcactggatacccgaacactttcttacacgtgataacagagttccatttcccaatcatactccacgtattatccacacagaataccatagatatatatttacaccattagtatagtaatagtattgttataatatagtaatagtattgttataatatagtaatagtattgttatagtattgttatagtattgttatagtatagtaatagtagtggtatgggtgtatctgggccacttcaagcacatactatagagctgtgtacacagataattacgagttaattataattttctgatgctaatagaggttaattaaagttaattatgtggaaaaatttgatttttaaaattttcgaaaattggccaaaaatggcctggacccaaaagtgacatttgggttcccgaaaaaatgaaaaattttcaactattccggaaattaaattaaacaatttcaacatatttagcacatcattttagacatcaaaatgcttttatttagttctaaaagttgttaattagtatagaaaatttgggttctttatgtatcatcaggtacacttgacagggtattagtcagtgttatttaactactagatagaaattttctaattattaccctaaactaacactaatttaacttttaaatagataaattatcctaaattaagttttataaaataaaatttcaatcaaaaaaatgttacaaccttcacttaaatttacaaaatgaatataaaattccttatttataactttagaatactcttaaaactcttatctaaacatctacgattcgattttttaatatactttgtactcattactatagctatttgcttgacttggcccagataagccctccagggtacccatttatacccacaaataactgcttaacaccctaaccactcaataataccctaattctatacttattactgtactaaaaatgtttgtaggccacactaatcactttcatgaacccaaaagttcatcacgtaccacccacctataccccaaccatacccttactattacttaactatacccttagaatactatactattacttaactatatacttagaattccttaactatatacttagaattccttaactatatacttagaattccttaactatatacttagaattccttaactatatacttagaattccttaactatatacttagaattccttaactatatacttagaattccttaactatatgcttagaatactatactattccttaactatatagttagaatgctatacggagtattaaatattgttataggagttggtagattggagatgtgtgaagtttatattatggagatatcaagttcgtataatttgagtcgtatattttccttgtataacgaggctcgggtgaataatttcctgtgtaacacgactgagatccgtgcgtttgagcagattgtccgcgtgtttaatcttatggatgataaaaatattgagataattaagttaaaccaaaaaaacagacctaaagatattgatcattcccggcaacctttcctgaactttgacgacaagagaatcttcctaaacctaacactgacaattttaaacaaactcaacactagccaatactcacccttggactatttatcactcatgtggtcatccgccaagttaatttcacttaaatttgtcgatacaaatttcgatggtatttttaccttttcagaacggaaaatcacacctgaagatattaaacacttttctgcccaacaaatcactaaattactcaccgcatactctgtcatcaaacggaaacatcaacttcacctcttccaaatctccaacatcgtcaccaacacaccagtcacacaattatacccccaagtaaccatcacacagtttctctacttagttatactacttagttatactacttagttatattacttagttgtgtagtagttacttagttgtgtagttactgtgatgatgtgtagatgttgaaattgttgttgatggcgtatgataatggtgggttggacacgggtagtttggttccttttgtgaatgagtttgtggctgctcgggagcatgatataccaaagtctatggcctctattatgatcaggtgcttaaatcataatttagatcaactgaaaaatactattgataaactttactccatcgtcttatcacacgaaggcgatcatggcaatttcgttgaaaaggtacgttacggtgcttgctaccgcttacttatatagtttctacagagttatttattacttagttttttctacagatagccaccccgatgggactctttttgtccccttggttactactaactcagttgcttatttacgcatccccattctattcagtttttgcaacttttttgtattttatttattttttgtaattatttttttgtaaatgtgttgttactgcagcagaaattgaggaaaatttcctcggtatttgctaacccgatcaattttgacatttatttccaaatttccattttttacatagactattgttaaatttgatttgtatagttaatttggtgaatgatttgtctgaatgtgttgtaggatttttatagagcactggagtgttgtattttgagggatgaaatgtttgaaaagtttgaaaaattattttattcgtccaatttaactctcaaaccatacaccatcaacctatcactactcaaactcaaacacactccacacaccaaactcaaaatcttcctcactcaaatggtactttcacacattcttacacacttttcacacattcttacacacttttcacacattcttacacactttttacacattcttacacactttttacacattcttacacactttttacacattcttacacactttttacacattcttacacactttttacacattcttacacactttttacacattcttacacactttttacacattcttacacaccttacacatttttacacatcttacacatttttacacatcttacacatttttacacatcttacacatttttacacatcttacacatttttacacatcttacacactttatactatctgcacatttaactgctggtgaaattgttgattgtgttgtaggctttggatacgattgatgagttttcgaattctcgtttgctttttttattgagacacgttgactcttctttgccaaaagatttactaatgaaactttacaaagtcttcaaatccaaactgtaatcactatacaattaaatatattgtatgaatatttaggcgggatattactggtattaaaaacttcttcaccgttctcaactacatcgacacacactcacttccactacacaatgatatcaaacgtattaatacacagtttttacttagttatttgtaacacatggagtaattgcttaaatttcttcttcggtccaccaccctcacactattttaccaaactattttaccaaactattttaccaaacatttaattaaccaaattaagtaaattaacttaattaattaaaataagtaaattaacttaattaactaaactaagtataatgatgattagagatattgggtaagatgaatgggttggtatttcagtatggtattttcccgatattttatagtgtggagttgttggcgcgtatatcaaagaattatgagattgatgtatataaggaggcgcccaggttcatagagaacttactctcgttgattagctctgactcgattttcctacccaacgccatcggcaatttcgtctacctcttatccgaaatcgcaccaacactcttccaacaatccgcacatctcgctaccacacaaactacacagtctacacattccacagagtctacacattccacagagtctacagatactacagagtctacagattctagtggagttatggagtctacagatactacagttgagactgttgctgtggattctggtgaggtaaatttgggttttgagtacccttcgtatgtacaagatacgatacagaataacgcgatggtgatattgagtaagatactaaaggtgatgaaggagcggttatcaaagagcttttttactccatttttcttctaccttggagaacccaacagtaccgccgccaatcgaaaaatgccactctctcccaatcaactcaaatggcccttactcttcctctacctcaccgtatattccacttacccaactatactattattatactattattatactattattatactattaccatactattacaataaaattaattgtttgtatattaaatattgataggtgaagggggggatgatagatgagatgagtttcccgagggaaaagttgttgaattatttaaatgcgattaaggacgagttgacaaatgacgacttgaacctgctaaaacgaactctagacatgctaaaattagattcccaagactttgaccaaatcataaaatcaatccccaaaggaatcgataccatcaccaactcttattctggcccctaattccccttaatctactgttaaaaaatcttaactatccttcattatcttaattttgactattttacccctaatttaagattaaaatagtcatattttatccctaaaatccttattttacgccttaactagtataaaatgtacaatgatgacattaactgaatgaggaggagtttaagtcgtggatggagtcgtccaggagtggcgtgaaatcggctctcgttggcgccaacaatcgacatccaaaatcatcatcagattctttctcatcaaactcagccaaattcaccgatttagtatcagtatcatgtgtgtgagtatgagtatgtgtgtgagctgtgccaagcgagtctgagttggtatgattcaggtttcggagaaagacaatttcatcttcagtgaggccaatttcattaattttagaatccagtggtaatccctttaacaaattcatcatctcacccgataacactgcggcacccgttttagtgctaatttccccagttttccctgttatttccggaattttaacacttatttccacagttttagttgattccatagattcagtgttggattcaggtgtgttcatagtttctccaagtttcacaatactcccccctgtttcattttggttactgggttccataggtttgagtgctaatgaattttcaggattggaatcaaaccttgaaaatagtttcttgaacttggattcaatgttggatagcattgagacgccctcaggttcagctttcggcttcacatcaaacggttgaatctcacctcgaatcttggcaaagtcacttgacatgacatcgagtttattctccaaacaagttaaattatcaaacttcacattcctaacatagtgttccaacatgtcatttgaattttttagttcctccgacaaatccagcatcttatcgtcaactctcgtcatctcagatgccactgtaaccaactggtcgtgacaaagtgattcagtatgagtcgggggttcactcttggagtttacagggttttcatctcctattcttccgtcttccctcttgagtgtttgaccagagtttaacttcctaattactaatctcgtaccaccctcaatcactccctcctaacaacattttaaagttaatatatttaattttatataagtcaaattaactccctaaaatcataccttatgatgtggtttgatgagatgtttgatttcgtagatatcctcttggttatttttgcacatgaattcaattttcgagagtttttcgttaatgctcgtgaggatttgggcaaagttgatgctgttggatctgctaatttcttgcatttgtgagttggagtcaatgacctgcgctgacatgtttctcctcggctgagtaataaatgacattgcaggagttacgaatttctgctccttgtactcaaaatccatattcctaggcttgtaaatcctctcattgtagtaggcaaacgaggggtcgaatctgggtggaaacctctcatcgtacccataaacgttggcattggttatgtaatgcattggtgacaatggcactgccatttttatcttcccaccctcgtttacatactgctgcttaaatacgggattcatattctgacgctctccggaaggaatacaacaacccaaaggagaaccgtttttcattaccaaattctctaaataatttataaatctaaataccacaagtaagataataataatttattgtataaaattgaaaattggcatgagtgtagattcaatttcaagtgcacaggtgagataatatgaaattaatgttacactatgagtaaatttattatttttttcgtttccaagttaaaatcttcttctaaattactcttcaaattgaatttatcaactgcattttcccttaagattatcagattttggtgtagattttcgtacgtttcattcatctccaggtccaatcctacagattagttataataatttttttacctgaaaaatgcttaattgagcatgcgagtgagtccatgagtttaactaattcgggaacactgtagtagtcaattctttcatgaattaactttaacaactgggtcagtagttggtaaacctggtcagtaacagggaactgaattaaatcacacaaacaatcaaacaacttcaaatccactccaacctttattccatcctcctctaatatattaagtattgtgtgtaagcagtacctgtggtgtgtttaatgagatttagcagttgatcaactacatgaaaattaataaactaaaatttcacctgtagaattgataaattcaagattgtgaatctcttgattacaaatttgaagtgttgttactgcctttaagatgtcaattttctccttcaaactgaagatttgagatgaatgttggcccagctgatttttaataaattccatacaaaattctgtaaatctgtttaatctagtttttagaccatttttaagcacattttccactgtgacaacacactcctgaccaaactctatgagattaacattcctgtcacataattttccacacatgtgaaggagatcaattgtaagaaacggtttcatctggcatgaattaacacagtaaaaaggatgtaacacgtctctcaccattattacacagtccagcaaatcccttttatccctcaccaacactatagtaaattctatttagtataaaattacctttagcaataatattctctatggaattgagtaacaacgagtataaattggaattcccttggaatagtgacgaaattgttatttcaggtttgtagtatctaactccttcatggccaggttcaaccctgtaataataattttggggatcaattttataaaagaaaacatgcgaattttcacgtaaagtactgggaactattctcctgacatcaattaacttaatattattatccctgatattccctatgatagagtagagattgggtaatattttaacggcattacttgttgagtatcttgaatagtctgacaccagtgatatcagattggcaacaaagtcaaacttgtgttcccgaatcttaaacttgtttatgactacattttcaattttctcatacaattgctcaaaattcttcatgtaacttacaaatttaccaggtaaaacgtgatttatagtagtgtcttctagactcctggatgactcactgtttgttaatttccacggcgtattattagtgttaatattgtgtttccatagccttttaaattcaattctatgatgcactgaggaaattagaaattcggatctacatccaaatatactcctcaggaccctaacatcacccaactccacagtattctctggtacattggatgactcaccaccgagtgcgtacagttcaaaatttgcgaaatccaattccttcatgttaaacacagttgaatgtattttggtgtatagttctacaaaatttgggtcccttttatgcttgaaaaataactcacccactgacaccaaatcctcaacactcaaacaatcaaaatgatcaaaaacctgagcgtataaaacgtctgttaatttcttaaacttaaaatcacccaacacctttaaaaattttatcacatcgcataacttgacggcgttgtgatcataagactgagctaagtcaggatgtgttgtacgcagatttggtatcatgtgatcatagaagatgagacataagaggttgagaaagcttttgtatcgttccttgtgtcttgagaatacttgaaatgtgtgaataatttgtgctggtgtgaacttgtgaatgttaagtaacatctgtgactgtaccaaatttctgagctcatgcgttagtactgaaagatgatcaaaaattagtaacaacatgacattgtgttctaaagttattttcctcaaatttattaacttttcccattgcaattggaggttattaattaacctttttttcatcaaattcaattctatctcattctctaacttggttaaattaacattttccaagtaattactgagagaattcagggtaaaatcttctgggcagccaagaatattgtgagttacagcagcgactaactcataactttcgagagtgtttacggataaatttacctttaaacgttcatttgttactttacaaactttaaaagtctccactacgggtggtttaattgtgttgttgatgtcgatgaatgggttgtaggtggagtcatctctgttggtccaggttcttctgagatcatttccctcaaatcctaacgaatccgtagcatctcttttatcctttatatcataataatttacagtactataggaattgatagtattatgggcaaatttgacaactctacgaaactgcgttttagaccttaaaacggcgttaaagagctttagaatgtttaaacttagataattattgtacataatatttcttgacatgtgtaaatttgagtgatacacattgtataccgtggaatccacaagaatttcagcagattatattttttcaactaattttagaaaaaattatttttataaataattaatttaaaattttggaattcggaataaaaatttacaaacctattcataaacactaaatttcataatttgatacaaattaacatataatccaaggtaacaaataaatcaatgttaaatgtttggaaatgtgagaaagtgtatgagaaatggttaaaattgcggttccccatccgttaagaatgttataattaattataataatgtaaaatattatgctttaactgcaaaaaatttcgtaggatatggaagaagagtatacagagtgggatcaattcagctcagaatcttgcgaaaccctcaaatggatcccctggttcacctccctagaaggccacgaattcctcctcgaagtatcaaaattattctccaatcaaactttaattaattaattaataaataaataaataaattaaataatgatttgataatttgtagattgaggaatcgtttgtgagagatcagtttaatttgagtgggttgaagagtttacgtaattacaacggagcgatgagcatgatccttggtccggcacctacggaagaagttttcatggacgggaaattcctcgaactttacatgaacgccactgatttatacggaatgctacactccagatacatcaccacacccataggactcagactaatggtatccccaacccacttcctactattacacagttaatcacattgttaacatggtcaatagtataaatatgtttatagagggagaagtatcagcaaggcgtgtttgggcaatgtcctcgtgtggaatgtcagcgtcagaatgtgttaccggttgggtttagtgacaatttacacaatcacaggataaagacatattgtccccgatgtcaggaggcgtatgtcatcaggtctggcgaagtccacgccgacattgacggcgcctttttcggcagatcattccctcatctgtttctactcacttttcctaacctcataccagaccagccaccagtaccctttgttcccaaaatcttcgggttcaaagtccacaacatcaactcactcattaaaatcaaactcgaaaacgtatccaacatttaaattatatttatttaattaattatatttatttagttaaattgttaatttggttaattgtgttaattaattgtgtgattaagttatttttagggtgagtttggaaagatagaggacgaggattccaattcgcaagatgagatgaagttagattaaatttctacaccccatcacttaatattttaactcaattccataacatttttaattattttaatatattttacaatttaatatttagaatgatgaaagttacgaaatttctttcttcgcagaaggtttgcgatgccttggttatgtttgggctacacgttaatcggactcctttcgtctcacatccaggtatttccactctattatccactatactctcctagaattaactatacaaatgtttatatagaattaatcatatagaattaactatataaatgtaaattaggagtaatggctgtggctcaattattggagatgaaatcgttggtagagcacagagcacattttacacaagaagatgttaacagaatgtacccattcgattccgaactcgccaaagtattttttacacaattccacacatttactcaattttctcgagtttactcaatcttctgagtttactcaatcttctgagtttgctaaatattttgagtttactgatgttgttttagaaggcgcaagtggctgtggatcatgacttaccaatttcacactataatcttgattatctagataaaccaggtacaacatccagttcctgtatttaaccccgttaccctctttaactctgttaccctctctaaatccgttgaccttaactgtgttaatattttgtaggatttttggagagtttattggaggagcgaaagttgaatgagcagatagcaactgaggtattatcctcaccaaaaggcaattacacaccacccgaatccctcaaatcatataaactgcccactgtaacattataaactctgtaatatttattaggtcccggtggagtggcgcgaacatgagttggcgtttacagatttaatgattgacgtacagccttcaatactacgagaaatggaaactcaagctaaaatgagagaattcatcaaagaacatcaaaaaaccttcaaaaccaaacaaaactaatttcaatcacataatcattaattatatatttaatattaattatatatttaatattaattatatatttaatattaattatatatttaatattaattatatgtttaacatttattgtggtcagattaaagtgttaatgttctaggggaaagttaatttgagtggtgatttttctatccctcaggatcggatgcgggagctgaatcccattcagtaacaaattaaattctttattactttggttagggttggatttgatttgtatgcctaactggtccagaatttcctctaaattcttgtcaaccacggggtctgtcgtctggagttccaataaatagtatgcattagggttaattttagaccaatttatgtcattttccagggcagagagtttgaacttgagggttttgaggtcagtttcctcagtggaaataggatcagaaccaagcaccgtcacggaaatgtcaaaaacttgcgtatttggaccaaattgtgatttcttctccagtagctttagcctaaatcttatctctccaactaattccaactgctccctaccgttaaacgggttaaaaattgttgatttatctattatacaagtgtaagattttgtgcatagtttgttttgtataatatttcgtatttggttgtacattggctcgtctgtggtaccaatgacaagtccattttggttaattttaagtttacttgggaatttaatggaatcttcaggaatcccaagccttgctccgataactgtggaaagtgattcagtaaacttcttctgcgatggtgagcatacgtgccaaccaacaggcttataagctataaatagacgctcacaaggacctctaaaaactatcctcacctcatcaaatatatttgccataaaaatatttcattgagtttacaccacacacactgataatattatttttccaattttgttaaatattgttaattatatttgaaataatattttatttatatttaaaataatattttaattattttttgaaattttgggtataaatggtgaagaatgtggaggttaatattcttccctgtttaatcaaatattccgggcccacagtgtttaaaaccaaatttaaagataaaatacggaaactatctgaagaatccgaagattccccaagttccacaaatgaaacagaatcttcagattctacaaatgctacggattccacagattccgtagcgattccaggtacacacctacgatcaccaaatttttaggcggatttgacattaaagacatttgtggaaattgcgccactaacgccaatttctcagtggaggtaacagaaaagctaacgagagacgtgtattactctatgaaaggcgtggataaactcctgaaagacaactactacgtcttatttagaggccgtcagatgcgaggaagtaacttagccctggagaattttgggtataaaatgagcgtagttaccagagactacagacataaacaatcagactactccaaagccacagcaaatccttccatacacctcaccaaaaccgccgacgtttcttccgtcacgtaccttttcacactatcaatagtacacaagtctagattataagttgttatctatggtttagggtttgggagcttgagaatgatgttagtccactaagtgataatctcgccgcttacaaatatttattattatccaaacccgtaagtcacaacaaaatttcacatttaataccttttcacattatttaatatttaattgggatttagttgagtgattatgaaggtgaagaggaatatttcaaatctctaaacactgatttcacacaataacataatttaatattacattagttagtgtgtcgtagtacggttgatagaatgtggtatgactgtgtgttaagggtttcaggttgttttagggcgttatttgccatctccttaacttctggaaaaagcgacaatattcctaatttacaaattccacaggtaaataaagctaaatctcgtgttgaaaaatcatttttaaggttttgaaagttctgtataacaaattcttgagaaatttgaattccaaatttcccgcacaaataggccaactaaatcatcttaaactaatttaaacctacgttagagaattgcaatgggttaaaattgttaaattttactattttacacaataaattccttgtcaagtccaagtctacagattgaattagttggaagagttacctgtcaaattaagctttaagaggtgggataggatgaataataattcctgtaattcaccggaattatactttaatttaagagctgataataccatttgtagtagctcagtgtcaaccagtgactttgagtaacctctcagaatcacagaaagttgatgtaatgacgcctaaaaatgataaattaaaagcttaaagttacgtggatcactagtttactcatgtttctggctaaattttgtaaatattcccctctcagtggatgattcgtagtggagaaaacactgtaaagttgtaccaatgaccttaaatccatactattcatacactttaatgaactaataatgaagggatctaaggttaagaatatttcttcagtgttgaaattggttaaaacgtctgagattaccatcgaaaatgactttggtgtcattgtttccatatgctctaacagctcttttaacaataattttaccatcttctcatccttattcttactatacacactcaatatctaaagaaataggtttaaaattggtaactttattatcagttaagattgtgtaaaagagtactagaacgagagggtatgaattcttggctgaggaaagttctgagattattctttctctaaattttacagcgatatctgagtcacaaagtcccatcttactaaacccaaatagaaaccctaaaatcacatcaacaaagtcatctgaatgtgtaaaatcacaacctatctagggtatgagataccacagcatgagagtaaatcagagtcttgaaccatttttaacgattgtttcttcaatttttccttaaaatttaagtcagataacgggcttttagtaagaataactaccattctggataaattattactgctaaaactatccataatcaagtcagctcttctagtcaggatattccatgttttctggtcatttgggcctctttgtaccacctggtccatgatactaaccagcctcgaagtaccaacccagggcactgacgccaacacatcacctgaaacactaactagtctaatcctactcaaaatcataaatataaaatataaaattattaaaaaattattctccagggcaatcgtgggtggaatgttgtataacgtcggaacaaattgtgtaatccgggttaaaaagttcaatctcataaacctgtgaaatatgctttaaatgtacgtttataagctcagttatacatttgtttatggaatcctgggaatacttgaatttataacttttaaacttgaacatgtgcaggcctctgtagtcacacagtactatggaacaatttctcctattgagctttagaaacacgaagttagccagtttctttaacattttaatagccttggaatcgaaattctggacctgtaacagagataattggaacgccaatgttctaacaagttccttgttcgggtaaaatttcaccgagttgatcaaaccgttacataaattaatcaaattttgacagttgacaagttccaaaatagccctttcatgtattttaaatggtagttttttactacttaaaaccaaatataaatcaataattgactctcttaagtcatctttacagccgtcaattctctctttatacctgggttctaggcttaaatcttccctttcgtaaattgaaattaccttcaaaaacaacttttcaactcttttaaaactattttcgtcatatttatagactaattttaacactgtaacaacgtgtgacaggagtccgaaatcacctctaacaactctttttgcaactattctttcaaataatgttaaaatttggctagacattttatttattctagtgtgattttttccatatatatccctcacattacactcgaagagaatttccaaatactcacaaacgccaatcaacatagtatttaacacaattttactaattgtactaggctgattgtgtactgaattgtgaataaccttgatgatgtatgtgataaatttaaagtcaatgtgatgacttgagattgtgagacatttgatatagtctctgcaaatgcttctaaaagtaccatcaagtctgaggagaagataaatcgataaatcatcagtgtactggactttaactcccattgagttatgtgtatacatcactgatctcgtggctattatagcattgatcaactggaaaattgagtagtaattcctctttaaacttactttaatcagctttagccagtcgttaaatcttcctctgctcattttaccactcaatacattgttcatattcactataaattttgtgtactccggggtatgggagtgtgtgatcccagtggcattttcccgtattaaaactctttttcctgatctcccatgataaataatattattaaggagcctgtgtaacctgttgaggtacgaaatggatgattttaaagtgggtaagaatttagccctgacggccaagatgcccaagtcaacactctgtaaaacagatttatagactttaaaattattttcatatgttaaatgatcaattttgttaatgaatatttcattttctccaattttaggcatttgggataaacaatttatggcaagtttcctgagctcaatagggccacttaaactcactttaacaaaccaatcgatgctaaataagtacaaaaacgactcatctccaacagttaaaagcttacttaacatcatcagcttaagcttatcatctctgagtaaatcaaactcaaagggttctattaaccacaactgtgacaacaagcacacagcttcgtttaaaatgtaaattgacttgttctgcagttttgcagagtttaatccaaactctagaactttgttaaaatcttccgaatttataaatttcaaggccaacgccaactgtagaattcgaatattccagtaaatctcatggtactgtggctcagtataggcagtactggccacaaaaaaagagttactcagaacaaagttcctaatgtacgggagaataaacttgtttctatgtcctgattttaaagtgataactaaaatctcataacaaagttgagtcgcatttggaggatttcccgtttcaactgccaacaaacaaatactaaccagaaaattgaggcaattatccgtctgattttcggggagaaaaccttggttggccaaagcgttggctagttgtgggcatagatcaaatttatacctcaaatcctgggtacacttgagcttattcaaatccgcttcatttctatcattctcatcttcatttagaaatataagaatcaagagtgaaatttccaataatttcttggatttcccttcaattttaccattttttaacaaatctctcagtaacttctttaataaatttatttcacctatgtttagtttggttgtctgagaatttatcaaattatccaaaatctcctcaacttttaaatttaaacttgataaacattcattaaaatctttataatttaagtcagaacaatgatttgaggggtattcccgggaatccaacgacacatcttcatttattgtgagattctcatcattatctcctaaaaatgacgaagtttttataaactcgacaaatttattactaaagtcaactaatgtatatgtattcatttataaaattaaattaactaaatatacatactgaatctcactagaatcagccttgaactttacactataaatttcataattaaacagcttaatatatataaaaataattgaaattaaaaatttacgatgttagaaagcctccaaaggtccagacttccatgtgtttgatttcaaagtggtaatcgtccgaaagcggttcattatcaaatgtttcactatgtgctgttgttcccactttgaacgctttacctatggtaatggccgggttatttcctcctccaatgattactgagtgatcactggagtaaatgaaacacctgttcttgccttgagatttgaaaacttttatgtttcccctttgaaatttgaacacaaaagtttctcctgagccgtaaaacctaagattatacctgatttgaggcgtgaaagcgccgaaaactccaccttttgaatcttctattactattatacagttgtccttattttcgagattcttgtaaaaggtgtggtaacttactccgtcgtggactgtttcgaaacttagaatccactccctaatcgcaacactcgcaggtaaatatgaatttaatttcctgaccatgtcaaaggttaaaattttacttctatttccaatagcactgaaatgatccaaattgacatacttatcatttggttcatccagttcctccggcgcatcagttagcgtattccaactctcaattaagctattacttgaaaaagggatccttgtgattcttgaccgatctgaggaaggcgttgagttattgcacatatccaaaagtgacatgagtttgtttgtgcatttgtaagccaattccttgttaaaaaagccaaatagaatcgatacgtgtgagttactccttttaaaaagcttactattcttacccttgtgtcctggtaaaactgagaaaattgctgaacctattcttgaaaaattaaaacctactgactttttactcctttctggcattggatcaggtaatgtagattcgaaactagagccgctggagtagtgtgttgtttcaaaactatcggaatactgctttaggaccacttgtaggaagccgttacatcgcatatcttccaatccgagcaactcctgggaaggtccgcctatacagccgcactctagaatattctccatatctacgtgtatctgataatatccttgaccgtgttcatctacgtttacgtctctgatatctggctcaaaggtcagggactctctcgtcagtgtcaaaacgcccagaatcgacctagaaatgatgcaatactggcatttttctctgaatacaattgtttcattttgtgaagtccttggtgatagtgattcgtgtgaattcctgggtgaagaatctgaaatatctgactgaaaggtggatagaaccgcctcttttatggcaccaggtgttagcctgtatttatagtcgaatgacgacatatcaaatcatcataaagtatcgaatcatgttttccgagatctcatctttaaattatactataaaacaggttcccacaaatatcagtcgcactatacataattttaccttttctagtcctttatttttttcttttacattatttattttacacatgctttttatatattttgtgatttattaattttattcttttttctaaaatttctctcctccttcatctggactcttacacatgtaactagccatcagatcaccaactattcatattacataacatgaaattatctaatgtgtaaacaattttaaaattttagattattttatcaattaaaaacactccaattccatcgttaaagctcttttcatttattttaatttccttcaaggccagtgtaatgtaccttccaaacatacttatccacgtttttatgcctgggtaatcatgtaagaatcttgaccagtcgaagatgttagtgtttgaacaactccactctttaaggtgttccattctgttatcccacatgtcaacgtagtactttaatctttcatccattggctttggaaattctccatttttaaactcaatttccgagtcatacagatccaaatacccttctacactatcagacaagttggcccacgtatcttttcttgagttggcaattaacattctggttttaagtccaattccaacttctgtcaaggctgctactccaaacttagaatcgtatgtaaactcattaattctatttgccatcttccctctgtagtatttgtactccttttcccagacatattcccaatttatgaaataatcttggattctaaggatcatctgaacaacgtaggggtaaataaatcccaggcaacagccccaagtgaccatctcaattcttgctctaagaatgaactcatgatctctcagaagcttataagatacttcatccagttgatttttaatgattttgaactctcgaggatcaaatgagcattccaaaagtttaagcatatcatttaattcaccctgatagtcatgactaccccgccctgagatcattaaaaactgatctatcctgcgtcttactctatcgggcgtattaagattagttcttttaattgatttagtaattgtcttgtaggatcttacagggtcaaaatcgtagtactttagctgtttgctcttaactgatgacattatgaggtaactgagtaatattattaacaaaaatagtatccagaaaattgtaatcagtttaatcttcaccgggttcatagttttttcatatgaattttccgtcgagattttaagttcggcaccggtacaacagcaacacttaccattttgacagcaacggcatttcttgcatgcttctgggcaagaacatgaaggttgaggtttttgttcatcaggatattcaactaatactctttgaagaggaacgcctacacaacaacaagtttgggtattagcagcagatgtttgttgtgtacaacattttgaatcatttatgcaaagcttgatgcaggttggattaatcttttttttggaatattttatctctgttacccggaagaaattaattttacaatgtaagtcaacttggatgttagaatggcagcaatctgacataaacatactcttaatataaaaatccttttgctcatccaatttttcgctaaattttggagtagtgtttggctttatctcccttatacagcatttttgatcccgagtataacagatgaaaaccctagctgcgtttttaactttagttttattacatttttcacatcgacataatttaacacagttagtacacggggctgtacactgggtaccaggacaacacttaacacatatacaacagtttgatccatttccaccactacaaacacaagaacctccactacctcctccacaaattgagcaagagtctgatttcgttccctcaattctaacagttaactggcaatcatcacaggaactagttgtaaccgaatctatttcgtaaattccaataagttttagacagttgcaacttttttcatcgcaattttgacaacaattttggttacaacccagttgttcacatatttttcttatatcacctccaacttctttttgaagcaaaagaatggcactatcagcatgttttaaataatccaaactcttaccatcaccatttgatttagaacatgaaaatctgttggaactacgacactgagttaaaggtggaatactgagaataaactcggttaatttatcttctcctacaatagctagatatggctttgaagcatatgcgttatcctctagatagaaacacttatttgttttattaatgattaccggatatctacaatagcactcagtaagaaacttatctccacaacaaggatatttagaatgttcctggtctttgcaattttggacaagagtattactaacgactacaaataaatcatatgagcagacgtatccaactaaagttgacaaggtaattatcgcaatgtaaatcccaaagttggaaaacaatctgagaaaaaccgaaaaatatacttggataaggaaacgaaaactaatattaaaaatattaatcgaataaaaacctaaattagcactacgtgaagctggaatcaggataccaacacaaaacccaaataagtgggaggcactttcaagtctggataatgaactgatcacatgaggagcgtagatgaaacttgatttcttattcaaatgggaattaataactggggacaagggtacaaacaatataatacacaaataaaaatataaaataggaaaaaattgtctcaaaattgatccaataaaaatgaaaattttattatcatcttgaccattatctttatttgaattaaacctttgagaataaaaattgcacaattgtttaaagctacgtgttctcaaaacaatccaatcatattcgtgattggctggttcgttgggaggaaatccaatctttcctttcattacttttatacacattgataggaaacagaatagcaatctagccacagccaatgttaaagacatttttctagactgtaattcaccatctacttcctgagttaccatccaacagaaacttggtaacaacctggcagataataaaccaccaaggaacgacagtactaattttgcattataagagtagtgaacacatgcctcaatcactaggaacgttgttagggctcctaatccaattgtaacagaggttgtaactagtaccgatgttactttaacccatacaaaaacaactaatatagctaaaaaatataaatgataacaatgaattccattgattagatcacggtgactttcgtcgtagaatattagggccactgtcaaagtgacaaatgatgtgaatattagcaaataccattgaaaatttggcgaggctttggtttgcgatacgagaatataaaactgttctgagcataccaaacatgataatcccagaaaatacgactccaaaaaatcaccagcatctggtactcttttcctcatcaaatgtgatgattcatttgtcaaatattgaaactacattttgaaaattttgcaaactattcattaggaatattaactacattttaaaatttttataaagagttcattaggaataatttctacatttgtgtttattaacagtaataagcatgaaaacagtacatgcttccccatctgatggtttcttctcaaacacttgttctgacaacgggagatttccttactattcatattaagtatatttatatgaatattattgagttactataatattcacatattacctctttattctactatatttatatttcaggaaagaaatatcccttttagagaactttcctaagtaactgaacttaaattgatccaaatcatcattttggtcttagaaattcctattttcagcttataaaatctttgtgaagggttataatacgacagggaacttaaaatattaaaccttagtaaacaagtccttaatgaactcattttaatcaggaatacttatgtttgtaggtaatatccaacaataatcgattaaaaattaatagtaatatacatttcttatcagaaattgctataccgtgataaaatttgcgataaaataccaataagtatgcgttaaaccaatatgttatcccatctttgatcttatcttaaagggtattttttgattttataaggtttaagatgttttgtccagtaaaattgtgaataaagtgtgtaaaaaggtgtgtagaccgtcattgactagatagtaaaatccagagtctggccagatttattagaatgattaaaaaataatttaattagttatatttaaattttgattaaaattaaaaaacattaaatactattctaatataaacgggtacataaacaaacaccatcacaccctaacattgatacaattaagttgttattttaccctgtttaattattatattttattatttttttcttattcaagttccataattatttatcttttaaattcatcttaaacctgaagtatttgttaaccatttcattatggaacatttacattgtaaatagttcaattacttaatgtgtaaacaattttgaaatcagattatctgattaaattatttaatcattgttctatcccttcgttcaattccttaagcgggatgttgacaaagtcattcccaagcttcaggtacggtgaaacaatctcaatccagtcttctatttcttcataatctactctgaatccttcccaatcaaacacgttagttttattaacaatccaattccccaaatatcttcttctatgtgtccacgtagttataaaatattcgagtctttctccgatacttgctggaagtgcttgtctgtccagtttcttctcaatttgatcaagttttgtgagtgaattgagttcctctttaagagtaatccaggaatgtgttctggttatacctattgatctgactaacttatctgtatgcgtcaggacactcagtagcgtcagtgagtacctcgatgtatgtgatattttgttaagcttaggtttaataaatctgatataattttcatgttcaacattccacataacttcccatttaaagaagaacctttgaatgtaaacgtacaatggaaatgcataagcataaaaaaatcctacccagtgactccacacaattagtttttcatccagatttctgagatcttgtctatttgatttgggcgggaattttgacgccttgtcttccatgttcctgaccactcttaggtgttccacttcattcatatatctacttaatgcttcactcatttttttcaaatgagttatcttttcagcattggcattttcaactaatctgttcaaattgattaaggaagttaatctttcactcacttggtctactgagttaaactttttgttttttatcaatttgtctacttgatcataagtggctctgggatcaaagaattttggacgatttctatatctggttatcgttataaacagctgtgtaataaagtatacaaagccaaatataataaacgataaaacaatcaacttaaccctaaacttgttaactttcttaacgaatgaactagtcttatctaatgttaattcgcacatcgacttacaattttggcagttagtggtagacccagaatttgaatctgaatgattacatttaggtttttcttctggatcacgtgatataaaaacctttgtcagttttcggtatggacaacaacattgctgagtcggggttttatcacaacagacttttagtttgctaaataagcacaacgagtttggttcagcaaatttcttcggataattaactccatttagtctataatagttatttctcaatgaacagtgcaagtcaattctcatagaagcgtggcaacaatcaagtaatgttattccttgtatatcaaaaatctcggatttatcgcatttctcgcctttctccaactgaccatcaaaatcaacggtatttggttttatctcccttaaacaacttccctcggtcccatttttaaaatatataaaaagtctagtacgaaatattgggactttgtattctttttctttaatcttttcactatcactatcactagtaccaccattaggttggcactttgttgttattttgcaatgacaattagtttggcaagttgggcatttgtctccacaacaacaaaattttatacaacaacaatttccttgatcacaattagtacagcaagagcaagttactgttttctcagtgcaacattttacacataaacaacacttttcaccattacatacggaggattcgcccgatgatgatgatgtacacaatgagcatttcccatttccatcagaacatacaccttcaagtcttacagttagttggcaattaccacacacactagttgtaacagcgtcaagtgtgtatattccaagcaacctcaggcacttacaattattattattacaacactgctcactgcagggtgtttgggacaattgggttatgttggagtcattaacacaaattattattgcacaatttccactgggatcatattccaaatatttacattccataatgaatttggagcacagaaaaggtttaggaaaaagatcttttggtggttcaaatcgttcatatctacagtaacatttatcattgaacttttctccacaacaaggtataatgttttcatatttttcaggaaatatggttagtctctcctgtttagagcatgtttgaattaatatactatttgagaatgctcctaatgagtaagaaaatgtatatcccagagcgaaacctgctagagaaaccaaagtgtacaaagtgtgcaacgataaataatgcccaagataagctagtgcaaaagaaagagtaatatccaaaatatagacaagaaatgtgacaatatagtaattacgatgatttgatgtcacagataatggatatgcaacaccaaaacaacaacccattaaatgacaaaccctcttaatattatcaagaattaatttttggtgggcggaataacgaaaatatattaaatgggtaagtggtaccgattttaaaataactgcggctgaaaacataaaaaagaaactagttatacgaagagcgttgcctaaataaaaagttaaataacttaaaatcttatcaaaaagatctactttattttccctaaaatctaaatacattgtcttttttacatggtcaaataaacacttaaaatcatccaacaaacttttggggaaattttcaaactctttacttgcctctgtgaatttattagttatatctttaaataattcaataggtccctttgaaatgggatcatacttggcttgtcccatagtgagcttcatgaggaatgctatgaggcaaaacacaaacctccatgtggctaaactttcagaaagtgactggacttgaatatgatgatcttcatttttatcaacgaaattcatcaaaaggtgagggaatgaccgtgctgaaaataaaccacaaatgaaccacaacaacccagatttgtatttagagtagtatgaacatgagtatactataatgagtgtcattgaatagcctatgcaaatagtgtgtaatgttatgataaaaggtgagtgaattcgatctttaacaaatacaacaagcaagaaatgcaatacgccaacgtgtaaaatgaaataattggcaaaattttctgtttttaactcaagtaaaaagtagcctaaaaccaagaaaacaatcccaaataatatggaataaacaaaccgagaccttgccatatgaattataaccaaaagaatagtatatgagaagtagaaaactttaaaaataaaattattctcgcagttaatgatactacatcctatcaatgttaggattacagtaatccctagtatgtagtattggaatttatttgaggccttagtatggtaaaataaaatttcgaactgatcagtgccaataaggcaagatagtccgaccaaaaaaggctcaagaacgtatgaaaaaccgatactcttttttatcatcctaggagatgactgagtaggttataaaatttaaaactacattattaaaaaattttaaaatatattacaaacattaaatattaaaaaatcttcatatttattgaaatataatagaaatttgtacatgcgtccccatgagtaggattcctattctattattagaattttatggtataattataatttattttaaaatatatttacctcacaacataatagatcgtaaaattgtatttaaattttataatgtttttaaacacattagcttactactattgatctaaatataaatccttccacatttacttatcattaattatacttctaacttattattcttttagaatttatattaatttgagcattacctatttatattatataacatacaactatttaatgtgtagttaattttaaatttttattaattgattttatagttttcaaatatttctattcctttgttaaatttcttatgttttaaatcaaattctttagacacaagtcttatatacctccagaacatatttacccaggtccttatatctggatattggatcaaaaatgtatcccagtcgaatacattagtgcttgaggacgtccattcctccaaatggactattctatcgtcccatatacggataaagtactgaagcctttcctctattgttttaggtaattgttcttcgggtaactcaatctccttatcatacaaatccaaataattttctactttgtcaaaagcacttgcccatgtttctttccttgaccttgaaattaacagtctggttttaaatccaatttccaactcgttcgaggctgccactgcaaacttcgacccatatgttatattattaatattttttgaaatcaattgcctgtagttataatattctcttctccacaatggctcccattttatgaaataagcttgaattctgacaaacatctcaatgatgtaggtatacacaaatcctaagcagcaactccatgtaaccagctcaattttagccctaagaatgaagagaggatctctcagtaggttagaagatacttcatccaagttctgcttgaggaatgtgaactctcgaggatcgagtgtacagtcaaaaagtttaagcatatgttttaggtcttcattgtacctatcgttgtccaaccctgaggtcattaaaaaccaatctattctacgttttacttcatcagcagtatttaaactgttctttatagtgttttttgtaatgatcttatgggatgttacagggttgaaattgtaatacttgatatcaccgactttgtctttggacgccgccaggtacatcaccgctaaaatcaatgcaaataatatccagaaaatagttatcagctttaattttataggtttcattttcttttcatataagttttctgtcgagatttcaagttcagcacctgtgcaacaacaacactgtttaccttggttactattttggcaacaaggacaattcttgcatgtttctgggcaaggacaagagggtttagaaatttgttcttcaggatatccaattaatactctttgaataggaagttttgaacaacaacaagtttgagtaccagcacgagatgcttgttgtgtacagcattttgattcctttctacaaagtaaaattgaggttggaatggttggtttctttgcatattttatctccgttaccctgaagaaattattgttcaatttgcaatgtaaatcaacttggatgtcagaatggcaacaatctgaaatgaacatactcttaatataaaaatcattttgtttatctaatttctcgtcaaattttggcctattattcggagtaatctccctaacacaatagacgccattacttttataacacataaagaccctggcgccgtttttaattttatcttttttgcaatttttacaacaacacaatttaacacacttgtcacaagttgtttctggacaacatttaacgcatatacaacaacaatttgtacctgtaccactagagcaggtacaagaccctccagtgtctcctccacatgatgtgcaagggttacaatttttagcctcaattcttactgttaactggcattcatcacaagtagttgctgtaactgtttctatttcgtatattccagccaatgtaaagaaaccgcacttgtcatttttgcattgttcagcacaacaatttccctcacaccctatctgtctacgtatttcactcacgctggttccaatatctttttgtaccaacaggatcccgtttggttctaaaggagagtaatccaaactatttccttcagagaatgacttagaacatgcaaatctgttaaaaagacggcactgggttaaaggaggaatattaataattagctcttcttctttatttgtttctacaatagctgcatgtggtcttgaagtgtaaaaactgctacgcgaataaaagcacttgtttgtcttattaatgattaccggatacctacaatagcattcagtaagaaatttatctccacaacaagaatttaaaggggttcctttgttgtcgcaattctgaattagattggtgtttataataacgcccaaattgtatgaacaattatatcccaacccaaaagccaaaaccattattatcaagtaaataccgtattgtgaaaaggacctgccaaaatacctcaaatagccaacaatcatcagatatgggatataaactattagattcatgaaataataatctgttcccctgtgtgtgatagtaacaggatatatgataccaacacaaaacccacagaagtgagaaaatgaatcagttctggttaaagacgttatcatgtgtggagcataattaaaatatgtttttttgcccccagatacttgaatgactggagtcaagggcaaaaataaaatgaatgacaaataaaaacaaataatgggaaaaatatgtctcacaattgataattctaaacaaaaatttgtacatttattgaaattacacttatctgaaatacatttactggaattaaatcttttggaataatgttcatacagctgtttaaaatcttcgactagactaccataaatgttatctaatttactaaaattgaatgttttcaacactggatactttcccttcattgccattatacttagtgacagcaaacagaatgacaaccgagccacagcaagtgttaaccacattttcctaaactgtgactcattatcttcaccctgagttaaaacccaacacaaacccggtaatatcctcgctgataatagaccagcaaggaatgtaagaactaactcagtgctgtaggagtagtgaacacatgcctcaatcactaggaatgttgtaaagattgatattccgattgttacagaggttgtaactagaactgatgttactttaacccatacaaaaacaactaatatgaccaaaggaactacatagtagagttgagataagtatatgaaatcaccaaaatggtcattaggcaatattaaaataaccagcagagtgccaaatacgaccaccaagaacaaataccactgaaactcaggcgaggctttagtttgggatacgagcgtataaaattgctcggaacctaccagaagcgataggccaaagaaataaacctctaatacatctgtgatatcaataaccttctttttcatcaaaaaggattaaacagtcctcctttaccatccaaactgcattttaaaattattcaattattttctcacatttgcgatataaatatcagtcacatatggactaaaagttacatttattactggattcatttccccatgattctcatgtgaattacactcattattaaaattatttttctattttttttaattttttattattttttaaaatttaaaaaatataattcaaacaaattcttcccattattcatcctgttacttgagttctaatttagttattcaactgagttttgttcttccttcttcctacttcattaatcatttattccagttaaaatattattaaatattttttaaaataaataaaaatttatttttttcttatttcaatgattcttttcctattctttttggattccatccctcatcctacttacaattcttatacttaaaattaagtaattattttaattattttagcaataataatattatttacatttattttctcattattttgcaacttgatcttacaattctcaatttactccattcttccattgttagtatttatttatttatatattttttagaatcttaaattttctctgttttaatatatcatacacacttaattatttgtatttttaacacttgttaataaatcttcagcagtaaactattgaataatattttaatttcataattgacaaatatccttgttaacctactttaaaatcatataaattaggtttagatgtatattttaactttggttcagtacatcttttttttcttttaaatatacctcaaaacctcaacctacttcattgatggtttcatataaatggtttaaatgaatcccaaatctggatcctttggagatgaattcctctaaggtttgtaaagttttggacgagatcgggattgacgaggaattcttgaagttaaagtccgatttactaaacgaattcacttcaaagggaggttgcgttccaggtgccgcctacaagcaaattcttaacggcgtattaaatattctcatccaatacaaagatatagaaagcaatgtgaagctaaatagggaatgttatattctaattcagcacattgcaactactgggaagtgcagattcccttggaaggtcgtgaaaatgctaataattgtaatatataataaaatttttgatgaactttatcagtcaaataagaattctacatcgctccagaactcctccacagctggttctgattcttgtgacccttctgattcatccactgaatctgataaacctaaggaatcccggccagctgataaaaaaattaaccaaattgagtctgaggaagagtttaaacaaatgaaatacgaatctttactatatattgtgggctttaatatacctccctttacacttcaacggctttgtgagattcctataaaacagccttacacagttttccggaaactgtttaacgcctacagaaaacttttcactgtccggaacttggagtatgagcctgtgaaactcccaaggtttttcaaaccttcagattaccctcacctcaggcgtgtgtgccgtattgttgactcttgggagtacaagtacaggcatctcactcccagttggactgacgaccttcttgctgagaacctcgacgaactcgactcttctgatgaaaagccattcaaacggcctctagaataagattaacagtctatttcctaattgtacttatagttcactgtccctattcacctgggcacctactctgtttgtaatgtttaatgtaaattgtaaagtatattttatattagattattttatcaagtttttaaggtattccgttctctcagagtccattgagtcccacttcgactgtgaaagttcaaccacttgatatcctgaaagcttcagattcttgattaatttctgcgagtttcccatgtaaaggtttgaattctcaactaagttccttgaatccaagtttgtggtccaaaacctcagttcatcttccactggtaccacttggatcacggttgttttatccttaatcacaaaattgcaaaagtatatctcagtaactccagaatcaaatttcacacccaacttctccaacacctcctaaaatcaataattaaccatcctaattatagggaatttatgtaaatattatcaaaatttatgtaaatattatggaaaatttatgtaaatattactactaattaatagttgtcatacctttactgttatgtatgtatttgatttcttgaagttgtgcgactttaattcttgtcttgtaaaccaagcttttgaagcctgttccagcctctttcctaacgactccacttcctcattgtaaatattattcaagaccaagtcaatatgtatttcatacaacttcaacaacaaatcattctccttaagctcatcaaacgtagatttagtattcatagttcccttttcagactcattcgcaccatcaccatcttgagtgatgggatataactggtcaatcactgagagatacaatttcttcaagttctgatctacaatcccaaaatttgcaattgaatacaataaatcaactttatctctaacttccaaattgttaaagcggttagactgtgagtaagatgagttcccactactagcattggatgagaggtagtttaacaggtaaatgtacaaatcattgtaaggtattgaaagtgctgataaagtgtcaaccagcgctatcaggtcttgaattacataatttgaactcttgaagttattcaataatctgaacaattttatcatataattttaacatacttgtcggtaaactttttaaccagtggatcatgtctcactttcaaatccttcaaatatctcaatatatttatcaatatctaaacattaaattatggtcaagtaatacaattaagttagttttaggtaatacaattaagttagttttaggcaataagttaagttataggttagggtaaaatttacttgatttggagtgtttgaaatgttaatatcataaacgtgatttagtagtgataataaattattatccaccaagttatacttgttaatgcacagtaacagaagctcaatatcactaaattaacattaaaactattagtttacacttactagaccgataaatggacgaggtatcggttataatattgtactactatgttaatgagggatcgatcaacttcatttgacaggtatgctagggtttgtaacagctgcacatacccatttttggtatgtattagtttatatgttaatattgaaaatagtttatttgtcagtgttgagtttacttttattaacttatttctctctactaagtttgttaatacatccaatttccctattgacaataacttattttccaatttgttcaacactccatccaatacctaataattattaattttttgttgattaccttatggtttaagttgttatgattgtgattgtttataatttgtataatttgatttgcagataacgtatcagtaatattatcaatattagacccgaaaaaggcattaatatcattatccttaaacaactacaagattattaatatttatatttgttaccataatgtttaatatgtgtttgttgtatattatgctattattattgttgtccaaactgtgtataattcttctcttgacaatttccatgactttaacttttaaattttgttcctcaggtgttagggtattgttagacccaagtgggaaagaggacatgatatggtacagtttaaagtaattattcagtgaaacagaatataaaagttcacacaattcattaaactccagtaaactcaattgattgagaaaatactttgtcaattcatcactcaggtcattcatttccaagtactcacccttcactaatattttattcctattccttgcagtgttaaagtggtccaaaacagttatcatctgaactggagtaaagatttctctgttctccaacacataatttaccaacccgtcaacacagtttttcaacattatgttactactattcctacacacactcatgtaacagtcaaatataatcaatacatcctcactataaactttcttctctgtcttatgtaacatttgtgacactttaggatataataattccagcagagaatcaactaagttacttaaatcttcatcagagtgacgattattcaagagcttcacgtttctcaacaatgtaatcagttcatgtttttcaaaattttcattcttcaatttatgtttcagtgaacataaaaaggtttccagcacagatttatcatcaaactgtttgaatacaattctcgagtgtcttactatagtagaaaggtcctcaaacaccattgacctaaatatttaaatatttacatacgattaatatgtataataatctatttagaacatactgtaagtattctttgtaatatttcctggcactttgtgggagttttagctttgagagaattgataaagtttcaaaagggacttgtttcactattgatggcgttttttcaactatttcaattatctacaaaatttcattatttatttcatttaccttttggtgtagtttttgggagtcaattgagtgtgttttaaacacattaaatagagttaaacaaaatattagctttttcttgtctggtaatttctcatttccaaggagttcctaaaaactaaataaactaattcaacacacctcctcgtgttttctcaaaaaattaatcagaaatggcctcaaagggccataattatcctggagtgaattatctgataagaattgagtagtacttatcagtaatgagaaaactgagtttaactcatagtatttccactttggatcgtttatttgtgttaaactactttctaacagttttggtaagttgtgacatttagcatcatcatctaaatttctgggtaaaaaaagagcctttggaactttaactagagatttcgctactgataaactctgactttcactctttagttccagaatctctggtaagttgattccctcaaaaatggaatccacagaatttaatactaatctcttggatttatctctactcaacttagagattacactgcaaaagtctgttaagttattcccagatgtgtttaaaacctttctaacatttttataaaggtcaaaagtggtagcccttgccattataaactgatttatttcaaacgaaaacctgttaactacatttaaaacctgttttcactaaatattattaccactaatattttaatccattttaatactaattattattttatattgttaataaattatactaacacctccccatgcgcctttgtgatatatatccacttatttcatttatttcaaaatgtattatatcattaaatttaaattatggtaatttatatttaattatatattttcttatattatttatgcttttataaccttgatttagggtactttagctgattccttcttggctgatttagaggaccttgaaaatgaggacaatgaacaggagaattcagatttgaacaaggatttaaataatgttgaaaacttcgaatccgatgaggagactccgataattgatgcagttgaggaatactttaacacatcaggatcttctgagaacagtttttcaactcttataaaggaccctgagattaactcaattgtagaggtaaatttccatttattcacaaaatcatttagaaagctaagctattatcactgagtaaggaccttaaagccaccgagatttcctttattgacgaatgtaataaaactgtactaaaaattgaccgggagattataaatattttcaactatgtgagagatatttactctaaaagattccctaaattggagtctattgtttactcacctcttgactacattgccgtggttaaaagggctcaaaatgaatcagattttaccaagattgacttgacagatttattacctaacagcatgattatggctgttactgttgctagtacagttgcttcaggcacttgcttatcaacgcaatttttaaataaagttttgtcagcctgtaatgaagggcttttactcgctgagtttaggaatgatttactcgtttacctcgaggggagaatgattttaatcgcaccaaacacttcagttttaattggatcagcgcttactgccagacttattgccaaagttggaagtattgaaaacctctccaaaatcccctctcaaaatctcatgatgatcggcgccgataaaaatcaaaattacattctcaacggtatcataaattattttactcttgttattttgttgtaaattattttattaaattatggtttaggaattttgaataactgtgatcttgttttgaattctcaacctagtttacgccttaaggccttaagattagtttgtgctaaagtatctttagcctctagaattgacctgtttaaacaacacaaagacgggaaaatgggccatgaatatcgcaaatccatactacaaagtctagccaaagtattatcccactcaattaacattttacacttttaacactattatttatattattaaatttttaggctgttgagttacccccggcaccgatgaagaaagcgttaccaatacctgaggagaagggaggtcgtaaaagaggcggtagaagacatagaaaaacaaaggaaaaatattctctgggcgagtttcaaaagtacagaaacagactcaaattcggacttgacgctgaagacgattttggcctagaaatgggtaatctcactaattatatagttacatatttgattttgttgaaaaaatttataggtgatggcatgggcatggttggtaaaggcaattacggtaaattactcattaaacccaagaaagataaagtacatatccgtaagtccactactcacactattatcattattatgataattaaaattaatttatgtattagctaaaaaaagagttgtgtcaatgcaatcgagtggcgcaacaaatggaatgtcgtcatcactaatatttactcctttacaaggtaatataataaataatatataaaatttgtataggaattgaattgtgtaacccaaacttgactagggaagtaaagagaaagtcagtactcgacaaccaaggcttcttaaaagtaaagaaaacttaaaccacttttcacactaaccaccgtggaccagtagaaaatgtgaattagccaccgcgaagttgtaaaaccatgtgaatggttgagccaggaactactttgtagtcatttaaagttaactcgtcgttcatctgtttccctaattacacattatataactagtctaatttattcttgaggttccattcatacctgagtaaattagccgaatctgaccagcgtcaatgcctaaacaatcataaacaactaaaatttacattctcgttcccttaggacttccttcacgtctgctatggtgttggtaggctcaaagtttaaggactgcctcttcccagtaagagttttaataataatttgcattgttttatacttaatttattattttataggcttaagaaagcaaatttagcgaaaacttcaaagttacgctcaacaaatcataaactattacaacacattgcgattctatctttaaaaaacacggataaaattatgtaatatcatgtataaaatcatgtaatatgtataaaatattttacgaaaaagttattaaattaaattcaccacctcttctcaacaccatcattgcgctataaacagaattcagaaaactccaaaaattcaagttaataattttattaaaattctatcaaaaaacgtgatataaataattattaactggataatccagtgttatatggagtgaaaatacatttttgtgtatatttttaactgagttgagtttattatccttcccctttagaggatcatacacatcaagctgaagagcaaaattaagctttaaaagtaccgtatctctcccagcatcgtaggcgtaagccctgttagaatcaacagaaaactgtaacttagtaccagcaaaccaagaaccgtcactcatatctaacacacaattaattaatagtgtgaaatatttataccttgatccgtttcaggctgtttatttgccagttgttcgtttttatcaatttcgccaagccttttagtaaacaaagctaatctttcgagggtctaaattggtgataattagggataaaattaccttttttggatcatgtttaggtttctttttcttccttggattatataaatcgtctgtattctctcttaacttcttttccaattcatttatttccttttttctcagttcatcttcttcttgatagacttggtcatcatcttcttcttcatagagttggtcatcatcttctacttcctcgtcgtccactggacttggttcatcaggtttaggtgtttctttaatctgaactgaagcttttgagagacttttatcttgtaacatatcgtgagcacttttgatttttacagcattatcctcctcctcatcagagtccaaaaatgataataaccttttatccctaatacatttaactaaaaagaatttacttggtttgagttgttgtaacttcttcttcctgttcctcaggctcagattcagatagctgtagtagcctcggcacaatatcatcgaaaggattatcaaccacctgaaaaggagtaaaattaacgaaaatacatgacagctgatgattttaggaggatcaaatggtctatcgtttttatcaacttcacacttgccaatttttaataaattgtaaattgagttaccttcaacttttccaaacaatgtgtactttccatttaggaaatctgacctatctaacacataaattatatagaattttggtacctagcgttataaagaattggctcatattagagcattttccacccgtattcgccatagccaccattcctaccaattatttcattagttcaatacaattttactataatatagtaataacataaaggtattacagtagtttgacacctctgtttctgaatttgagtcttgaaacaatttcattttcaaagggttctccataaacactttcacctcctaaataacccatttatcacactatataacaattatacaataagaatatgctttaaataattgagatagagtaagaggaaccatttcctgtaccggaaggatcaccggtttgaaccatgaaattgggaataactctgtggaaaatacagttgttgtaatagccttccagacatagttgaatgaaattcctgcaagcctttggacagtgtgaactccaaaggtgtatatccaaatcgcccaaagatgtgttaagcacaactctacccttacaggaaggctccagtgagtatacttcgctcattcctttaatttaccacagattaaaatattttatattacattattcttcattatatatttgaaattataatataaaagtgattataaagttatagtgataatataaatagtgttattatattagttagagtttaagatttttattttgtgctctgatttggtagttgtctgagattccatatcgacacaattccgcagaatcatcgtccatttcctcacacaacggcatcttctacacataaatataactatttactacttattggttaaaataattaaatatggctaatagataccttattgcagtagacgagtttaatatctttgagattcattttgaagagtttactgcagagcagtttaacgtctgaaactgtgcaggattctgataatttcttctccacaggctcgtataaaaagctctcagaatcaccatctggcactaataacactttgattctattcttcttctccagatttaacttcaatccattatgttctggttccttattctctaaatagtttaaataacgttcagaatttgttctttcctcgggtgttatggttgtgccatttaatacttttaaatttacaaatgttactatcatatacattctcattatttcatcccttttttcctcacccacactaactaaggatagattgataaaattttccataaattttgggtggattgggtttgaattaatctttaaattcgttagattaggaaatgtttgcgataattttagcatagaattgatgtcgtcaattaaattatttgacacatcaagctctaacaaacctttaaactccactccattcacgtccaaattatgtaaaagattgtgtgaaatgaataacttttccaggtttggaaatagtttaaaaaggttaaaaagggaattccagctgtaaacaaagttattactcaagtctaacactgtgacatttgggtaagatttccccttgaaaacaacttcatccagattattatctgtgaaaattaactgtgtcacatttccacagaggtttagagtctccaaaaccatttcaaactccacaaacacactgctcatgattaaagttttaacatttgtggcgttaattggtgcgtcaactttattcttagaaacgtctagcagtgttagatttgggaaatactccaccaacttgttaatctcagaggttgttagaaggttatttgacaaaaacaggtctgaacactttgggaactctgttatagttccaattttactaattctacagtcatttaagcttactgtaaatagttttttcgggtctgaaaagaaactacaagccttttccattcctacaaattcgtaatttacagttgaatctcccacttccaactcctcatcagtagttaaatatttatccctaaactccttttcaaatgttgatcctaagctaacggattctgaagttacacaggaaattggctttgcaaaatcgagaaaattaaacctttcagataaaattctaattacttcctgaaaatttaaactgttttccttgattttattaaaatgttcaaagatttttacttttttattttttattttttctagccttttagagccgtcaagctcaccccttgtccagtcgtcccattccaccaataatttaccttcattaacattattttcaccattttctccacattttaacggctctgaaaccacagttccaagtgaatctcctaccaatactctgtctcctaccttcaactccttcatttaaatttagccttaatttgtcctactttacacttattctgatgtatttatcagaaattaattattttacaaatttttataaaatttaaaattatgttttttaaacacctttcaaagattccaacaagtacacctcaatactgattaatttacccttaaaatttcacacatttccatttattccacataataataaatatgacaaattaacaaataatgtattaattatattattcttcaatatttggtgcgagatagaagttgatgaagcttgagtcttcttcatcaccgaacccgaactttacagagagtggaattccagccgataagttaatcgagacctgttccgccaaattcgtcgcctttgaaaagagaactaaataacgagttgcgaaaatttgtgataaattctcaaggcttgtgactctgacctctccgacgtcggtatggaaccgtttacttgctcttattccttcaccttcagtttccagcctcatctcattctcggtcatgcttatggtcactgtctccccaatcgagtgtaaatactttgcaaactcctggaacttcttcgagttcatcacacatttacacgagtagtcacacgtcgggatctccaaatgctctctatccacctctatcaacttcacctgtgcctccaacgaatccgattctaacacataacatcactcgcaatattaataatatcactcgcaatattaataatataactgtattatacttaaattaataggtaaaataaggtaaaataaggtaaatagaggtaaatagaggtaaatagaggtaaaataaggtaaataggggtaaaattaagggtaaaattaagggtaaaattaagggtaaaataaggtaaaataaggtaaaataaggtaaaataaggtaaaataagggtaaaataagggcaaatagagtgaataattaaacggtgtaaagggtaccgagggtgagattagctcctacgtcttcgatgattctgatgttgagtacgggatcttcggtcatatcacctctggagaggtaaatgagtgacttttccttgacgacggataagattttaagcatgaatgagatgtttaggcccagattacagggcaagtcacacctgtagaggtgaaaaaagtcaggcgaaagtttcaggtgaatgagtgaaatgtgcgaattatccatcgcctgcattgttaaaccctcgtctgagcagtcaatactgacatcgccacaaatatccttcagagactcaaacaaacgcctcaaaaacataccatccaatttacactcaaacatcttccccaaaatttttactcaatttcgataattttactcgataattttattcaatagtttaggtaattttactcaataatttcgataatttaataataatttgaattataatttagattagaacgatcaaaatttgatatattactacacatcaagggaataattggtgagaataatgagaagagtacaaaacaggagaaacaaatgttatactctgcgactgagtaaaatgttatttaagagaataaatttaaaagattaagtggagaatgtgtaacttagttacaggaaacgaaaaaaaattccctttgaaaaataaaatataatatacccgtcactcaaaattttaaaacgccaataatataaaatgttacaaggatttaattaaatgtaaaaggggacgattgtggtagaatctgacgaaagctaatttgtagtgtgaagattagcaagtcagtcaagtccacttaaagttggtactgatgagagataaaacgaagataaaatacgaaataaaaataaaatgtgtaattatttacaaacaacatcaaaatctctcccccacagatcacctttccagattactcttcatatcagtcttatcactcccatttcacatcattttatattttttaatcagcctacttcaccgtttaatcgcacattcacacatttcaatccccaatcccacttttttgactattttttttaactttcctgtatattatttaacttacatttttcaataattttttcaaattttaaattccttcaatttattcatttttcacaaaatttttattttaacaatttttccaacaattttaacaatttttcaacaattttaacaatctgtgataatcaatttgatgtagtaattttaactgatggaatgtgttagtttgggtgaagtgacggacggagatgtgagtgatacgtttgattgtgtatgtttgagggattcagatttgaatatttttgaccggaatttggaattttttgaagctttaaacttaccaggcgtcggttccttcttatcctcagcctatgactttgtcagacttaccttcttatcatcccgcagacccaccagatttgcatataaatccgccaccagaaagctaatcaaatcactaaaacatctattccccaaacaaaaaaccgtcacattcgatctatacactgataataataataaaacagatgacagattggatttattatttgatttttttgtaaatgataagtatttaactgttatttcaccttatcaaaggtgtaatctcaaagtcactaccatacaacttaacacacaatatgaagaggtaactgatgggttagggcacaaggggacgaaattaggcgttagtaactctgtactactaacttctttatcagactgcgcaataacttcactatgtgtgaatgatttactggccttggggtttgagttatttgttacattttctaacaaatccgtggctttctttagggttagcacttttgactatgataagtcacctgaatattccatttccaacgcagttaacgttactgggtttctacagttgaaggagccagcaactttctcaaagtatagtcccaaccgggaactaattctattgaccacggacacatcagtttatttactggaaaagagcggatttgatgtggagtatgagaagttgacagagttcaagtcgggaacacttttatgcgcagatttcctaaacgactttgagattttagtactcgaaaacaatttcatcctcacagtctacaaaaagtataaccaacaattccataaattcatcaaatacaatattaaatctctcatcaccaatgttaatcccgtgaattctgtgaactctgttaactctgtcaactctgtcaacagtgtgaataatgtgaatagtgtgaattcgggtacgggaaagtttactcgggattacatgggaaacttgtatttactcgtgaagaatatgaacctggttaagttcacttggaccgagtccattctaccacactccagccaacttaacctacaaccaccaaatgatctctaccacctcgataaatcctcaacgtatcatctaatcactcaatttactcatagttaatttattaagtaattagttaatttagtaaatttattgagtaaataattaactgaattgtgtagtttggtgtacaattttggaattgagaataatttggttgtggtgacgtttgagaaatcgccgtgtgtgcatttgtacggcttatcctctttgaaggagttgtatcagctgaaaccaccagtgcagggctaccttccaaagctttttagcacttgtgccagtaacaactgctgttacgttgttgtcctgtgggtacacaattcgaattttaccacggcgttgggtgataaattaagatcactggtgcagagaaatgtgctgcacagggatattatcagagtttacagagtgaaatcagggctaaccaaggacccagtgaccgatgagcccctcaactactacagcaccaggccggactttgctaatattaacaccgtaccaagcaaaatcaacaaactccccatcctctcctcactacaccccaaaatcacactcaacagtaattcatacccatttactcatctaacttagttatccagtttagttattcagtttacatggttcagtagttaacagtatagttcagtagttaatagtatagttcagtagttaacagtatagttatgtggttacgagtatataatagaggctgataaatgatgatagggagaaatgagtataagaggtgtgacgatgtgtttgggtataggaggaattttttaggtcgttcgctgagtgatcacggcttcagacaaccgcacgaaaccgtctactcactcgacgaattcatacgaaacagacataaaaacttttactaacttaatttcacataaatttattcaattttattcatttttattcaattttattcatttttattaattatttttattattcattttattaatttatggattatttattttaccaactttgtgaattggtgacagaaaatattaaaatattgtcagaatgtataaattagataattaaggagtaaaataggctaaaggggagttaggggagatttgtggaatttgtgtaggtgacgttgtttgacagatggggtgtaatgtaaattttataatatattttttaaaagtaaatcatgaagtttcttattctaaactgtttaatcttgttttctctgatctcctcagaggccacaaacgtcaaactcgaccgagaagaccaaaaccatctcgtcctactcaacgagaaaaacttcgaaaaactcactcaagcatccactggagctaccacaggtactctacacacaccgacacttcttcactcaatttctcttcctccacatttatttcttaattttacttatttcctaattttacttatttcttaattttaataatttttaataattctatttacattttatgatttaattaagtttacaaaaattaatgtgaactgtgtaggaacttggtttgtgaagttttacgctccttggtgttcgcattgtaggaagatggcaccggcctgggagtcgttggcaaaggctttaaagggtcaggtgaacgtcgctgacgtcgatgttactcggaatctcaacctcggtaaaaggttccaaatccgcggctatcccacacttttactctttcacaaggggaaaatgtatcaatacgaaggcggcgaacgcaccgtagaaaaattgtcagaattcgctctaggtacgttacggggcttgcacattactacacagttactcttactcagcactgctccctccccccttatattagctccctctcccctatatagttaagtagctccctctaggggtatatagtaagatagctccctcttggggtacccttatattattagctccctctcggggtactatttccacagttatttacccccttgtctccttgtacatgattctgtaacttctatactaaactaatattaactaaaatatgtttaggtgactttaagaacgctgttggcgctcctgtgccgcagccgctgtcactatttgccttggtgagtgactttgtagtcagtggcgttaacgaggctcttcgcgtgtacgacgctgcacttgcgggatttgtcaccatttcctctttttctttcctgtttggactacttgtaggactcatgctgtcgctctttttattcaccagaagagcaaccaggaaacccaaagtcctcaccgaacgcaaaaaagataaataacacacacacacataatgtattatacacacattcacactctttacacactctatacacactttacacactctacacacactttacacatactttacacactctacacacactttacacatactttacacactttacacactttacacactttacacacactttacacacactttacacattctatacacacactttacacattctatacacaatatttagtaagtcgagagtatattagtttggggttaagatttcctgggtacgaatgggaagatattcttgggaaagatcggcggtctgaggtggcatgaaatatccttcatggtgtagaggttaaagtcggcggaaagggcaccgccgacagtcagaaacccaagcccttttatacacaagtcacaagtcgcaacctcccaaccactcatcaccacaccaatcctccttccaacccatgtttctccagtattaactgtagtattattgttcatattgttcccagagttaatagtggtgggatattgcgtggttggatagtagagaacttgattgttatagtgttttcggaggaattggttaattatatgtgtgggtttgatgtggagtttgagtttatcggagaagtaacacttgaaaaatacgtcacggccactaatcatgtccagcctcacatacctgtcaatcaacatactataccctaacattcattatacaattatattaagtgttataacacataactaagaactccggagggataactaagaactctggaaagagaactaagagttcaggagggacaaaaagagtcccattggggtggctatccgtatatataactaagtaataaataactaagcgttagcaagcaccgtaacgcatcaccgtaacgcacctttcttgagtgtgattggtttattgggataaatattctgagtgatgagatgttttaagttaacatcgttaacgtgtgagatgagcgagttgggcacgaaaatcccaggcgtgtcataaatactcaaaccgccaccaagtgatatatttatcacacccaacgtcgttccaggaattatactactcgtcactcttttacacacacaattatcagatttattagtcacaccattagttgtattgtgagtgaattgtttgtgtagagagttgtgagtgaattgtttgtgtagtagattgatgagggtggatttgccggagttagttggtccgatgaagagaatttggttccccagccgcttcgcctctgtcaatatcacacccatcaactcacccacgttcttcctatacttaccacttatctataccacacattagtaatactattaactagataaataattactctaagagggtaaataattactctaaggggtaaataaggaataactaagtgattccgggggtataggtgagggaataagagtgtctggaggaataactaaataagtaagcgttagcaagcaccgtaacggacagtaaaaatatgtttggctttgagtagttcgactttggagttgatcattttcttgaaaaattggaccagttcctccttattgtgctttggcaacaagtcaattttattcaaaattaggtaaaatctgacgccaccaatcgactcacctatggtcataattaataccatacaaatatttatattatgaacctaggggataaataagtgtataataaagggtaaataaggtataaagggtaaataaggtataaagggtaaataaggtataaataagggtaaataagcctaaaataagcctaaaatatggctaaaataagggtaaaaaaagactaaaaagaagctaaaaatgactaaaaagaagctaaaaatgactaaaaataagctaaaaatgactaaaaataagctaaaaatgactaaaaagaagctaaaaatgactaaaaagaagctaaaaatgactaaaaagaagctaaaaatgactaaaaataagctaaaaatgactaaaaagaagctaaaaatgactaaaaataagctaaaaatgtataaataaggctaaaaatgactaaaatacagctaaaataaggcgtaaaataaagggtaaataagtaataaagggtaagtaggaggaagataacgggataaatctgtgtgagtggtagcaagccccgtaacggagaacctacgttgtttaataatttgtagtaatttatactcgatgtgcggatcaatgacgtcgataatgtacaaaatagtaacccgcctccgactcttcagcctcaacatattcctcaccacacctatcgtctcattcgacgcctctcttattcccaacacattgttccccttattccccttattccccttatttacactgtttacactgtttacactattcacactattaagagtgagagtgtttggagattgggataggagggttgagatattggaggagagagcggagcaacgttggcatttgctgagttcgttgtggaagtaagattcctgaacgtatccgcgcccgttagggtttgtgaattgtaagttaacgccgcagccgtagcattttttaccgaccccaagcaccttaaactcacgcaccaactcacgccagtcctcatatttatcgcgtttacctttatttttctcatgattgtgttgagattccctgatattctcggtgattatgcgattaaacgttgagttttcctgcggttccaggtactttttctccaactccaagaggtcactttcgctcaaatcttcatttgctgaattttgtgtactcgaggggttttttgagcttaacggacggggttttggaaatttgttcgagttttcccactccttaactgataataatacttccctaatcctctcattttccactacatcaactaagttattagtgtcacctaagttattcgtgtcaactgggttaacagggttaatagtgtgaagtttgttgattgggtagttggagtttggagtggaagatttgatgttgtaatgtgtgggtgtggaatgagaaaaaaaattaaaatctgaaaaattattaaaaaataaaataataataattaggtaaaaaaacctttgatgatgtagttatgtgttgaattttgggaatttattagaaatagggttaaaagcgtaaaaaacatctactgaacactatcactcaatatggactggttaaactcagcactcacagataccgactcagacgattccacaaataataatttaaatattacagaagatattaataatcaaaatgataataaaattgataatttaaataatgataaaattgataatactgtggaaaataatttaaataatgtgaataaagttgaagttttaaatgaggagaagaaagttgaagataaaaagagtgccggaggcctgtttacaataaataaaaaactgaggagaatagagaaatttgataatgtaaagataaaatcacaagaactaacagaaacagatttactcgtaaccaaacccccggaaacacttgaaaaatccgatttaacggacgctgaacctgcggcaatccctgaccagcagaagtatgaggaaggaattgattataacgaggccatggacagttttaacaagtcaaacatcaactttgacaaattactcaagtcgtcacaggtaataataaactattaaatatattttagtggctaggacctaaggttaaagtcactgatatcaaagccgatgatctacgactctccaaaatgtaacacccctagttacccagccccatttattatttatttgcaacctttttgtcatttattttacatttacaattattttttgataaataagtggttgaagcagcagaaattgaggaaaatttcctcggtaaatcctagcccgatcaactttggcatttatttccaaaatcgtgaaatttgaaattattttttcctaaaattgaccaaatttaatctgcggttaacttggtactaacgttgttgtagtgagaaggagcgaaattacacgtgtaacaaggacattttgtatgagggcgggaaaaggtttaacatgcctacgagacttatggaaactgaagacggccacgtaatcaccacaaacgttgccagaagaacacaaaaacgaaaacaccaagtccacaacttaataatatttactcataattatctacagttaaatattattgtgtaaaatgttgtagataaattggttggcgatggaggcgcaggataaggaggctgagatcctggagcaaacaatacacatgaggaagagtaagcgagaaacccagatgaagtacggctggtaataaataaaacacattctcaccaaatttaatacaaacttaatacaaatttaatacaaatttaattttaaattttaatcaaattttaataaattttaatcaaattttagtaaatatttttttcaaattatttaattattttttgtatttgtttggatgggggctggaatcatcttattcattccatatcataattttataattttattcattctatcgtaattttatttattaaatataataattttataattttatttattaaatgttgtattaaatttaatgtaaaatatttgagtgatttaaagtatttgaataatgtaaaatatttcttgtaaaatggactcggatcctaataatccactcgactgggaaaattggacaggtatctcctacattactctattcaccactattaaacctatataaccatacccattatacccctagagggagctagttaactatatacctactattatacccctagagggagctacttaaatatatactcttagatatacccaagagggagctacttaaatatatactcttagatataccccgagagggagctacttaaatatatactcttagatataccccgagagggagctacttaaatatatactcttagatataccccgagagggagctaatttactatataatggagagggagctaattaataatatacttataatactatgtggaacagtgtaatgatgattaggtgaattaccgttttggcagcatgcgttttgtggtagtattgctggtgttatggagcatatttcgctgttccctttggacaccattaagaccagactacaaactaattcacctattcacaattctataaacagttctgttaaccctagaaactcttctaattgttatacaattagtaacggtgttagaagattaacgacgtatactgtgaatactaagttagctcccactagaggcctgtatactaacctgtttaagggaagtaatgttataataattggctgtattccggcgcatgtattatattttactgtgtatgagaagataaaaaattcaggcaatattgcgatttctggcgcaacagctacgatttgccatgatttaattttaactccagccgacgttattaagcagagattacaacttaatttacacagcaacactgcggagtgtgttgctaatctactcaggaatgagggagtcacagcgctcttcagatcactttcaatcacactttttatgaatatcccctatcactcacttctcgtcaccattattcatctcctaaaacaagttaaccatgaagagaagattagcaactataaacaatttgtttactcaggtgcgttacggtgtgaggtccgctcacactagttatgtatctacagagttatttctacagagttagccaccccgatggctctatctttgtccccttggttactagctctccagttactcattaatacagttttaccttaccccagatattacagtttttgcaacctttttgatatttattttatttttgctattgttttttggtaaataagtggttgaagcagcagaaatgactgggtgagaaaatttatttctcctaacccgatcgattttgacattttattttttttacccattttttgtaattattttttcctcaaattgacataattattgttaactaattgttaactctgtggctataggactgggcggtgcgatagctggagctttaacgacacctttggacgtcattaaaacgagactacaaacacaaacttcaccacaccaccaacccctcaaatacaaagtacacaactcattactcacaacacacaccacacaaattaactaattactcaataattactcactaattacctacttaataattacttaaataatataattgatgtgtagaacgtgttgatgacgtttaggaatatatatcgtaatgagggcttgagagggtttacgaggggcatgagcacgaggattggcatgtgtacgccgtccgccgccatctcttggggcacatacgaaacactcaaaaatctcatcaaactactcaactaacattttcatcacattttcatcaattttattacttaattaattatttattaattagttaaatagtgtgtaaagtgtgtaaagtgtggtgtgaatgaggttggaataaattacaggtgaaatttaaagcttcaaagaccaaaaaatgccattacacttaagtcccatcactcaaatcccatcactcaaatcccatcactctcatcctttcactgatttctttaatttcctccggtcaagtgtccagtctccgaggaaaataactcaataatctgctgcaccaactacacatttaccaaattttaattccaaattgtaaataaattacaaaaaggttgcaaattaataataaatggggatgtgtaacagtgtgagtagtgtgagtatgtgagtagtgagagttaatgaagaaagggtttgagtagtgtgtagagtgtgatgtttatttcttgttcttgtgttttagtgttttctttgtggttttggtttttttggtttgttttttggttttggctgtgcgtttggttgctttgccagtgtgtttggcgttgagttttggtgcttttttcggagccttggcctgctttttgacctgttttcccgcgtgcttgagcttggagtggtgttggttgagtttgacggccagtttcgagtgctgaccgcccgaaagttttgtcaagggggcttttttttttgaagccccgacggcaaccttcttcttcaagtctttcttcacctccttcttcaccttcatcttgctcttcattaccttcaccattttcaattctaaactgctacaatcagatcacaattgaaatccttgggtaaacaaattaaaaaagtaatttcagggtaaaaagtaaaaaaacccgtaaagtaaaaagtgggaataaaaggggaaaatgtgtattaaaagggtaaaatgtgtacgagaaaaacaaccaagttgacaaatcagaaaagaaaagtcaggtgtgtaaagtaaaaaaagagaattaaatatgtgtacagcgaaaaaaattaatccacactactctattgtgggtcaacccccacgtaaagctaacaagtgcaactctacattagacattttccataccccttttcacactctaaaactcatcttataaccaaaggcgcttttaacccttcacccacgaatctcagtctaaaaccccaaaatcaacacccaataaacatcatttccaacgccttcccctatcaattttattttttatacaatttcatccagaatccgacgtcacagattttttaaccactgatctttcttcaattttactccacaacaattttctgatccgcaacccatcaccaacaattttcactttccactgatctacagatttttcagtaatttacagatttttccagtaatttacagatttcgaatttttttcaaaattttgattattggatcttaaatttaatttatttgatcttaaattggattaatttattggatcataaaatttctgggattaaaatttttttgggaaaagttagaaaatgtcagaggataatcacagatcagagctgatttacacggccaagctcgccgaacaggccgaacgctacgacggtacctgccaataatatccccagctattactaattgttaattatttatctccacttgtataattgtttagagatggcgaatgcgatgaagactttggtggagacttgtgtttcagataaagaagaattaaccgttgaagaacgtaatttactggtacgctaccttgctccctctccctatatagttaggtagctccctccgggggtactagtttcctacataacccctagttacctactaccccatttatttctctttttgcaacctttttgacatttattttactatttacaattattttttcataaataagtggttgaagcagcaataattgaggaaattttcctcggtaaatcgtagcccgatcaattctggcatttatttccaaatttgtgttttttggaattatttttacttatttgacgttgttgtagagtgtggcatataagaatagtgttggttcgaggcgtgcgagttggcgtatagtgagtagtgtggagcagaaggaggcgagtaagaacaacaccagtcacaaggcgctcgcccgccagtaccgcgtcaaaatcgaaggcgaacttaacgaaatctgtaacaatatcctctcactcctcaacaataaactcatctcctcgactaatgtacgttacggggcttgcatccacttagttattgaattatttacgtcctaccacttagttatccagttattcctcctggaccagttccccagtcattagttacacagttatttagtcaccagacccctagctagctccctatcccccctatccccctatcccctaattatcccttaattacctatttacctattgttatatattgtggtttgttgagattaatgtgtgtaggagagtgagagtttggtgttttattataagatgaagggtgactactaccgttacgtgagtgagttttcctgtgacgacaacaagaccaacgccagcactaacgccaaggaaagctaccaacgtgccactgaaatcgcagaaaatgaactaaaacccactcatcccattaggtatcccgttacggtgcttgcttacccttagctatgtagccatttccctcccctttcctcagttatatactctttatcatactcttaactatcttactattatacccctagagggagctacttagatatatacccccagagggagctatttaactatatacccctagagggagctatataattaatacccctagagggagctagttagataagacggagctaattagagaagagggagctaattagagaagagggagctaattagagaagagggagctactttagtatactggttggtgcgatattgtttgtaggttgggattggcattgaatttttcggtgtttttttatgagattttgaacaagcctcacgaggcgtgtgagatggcgaagcgtgcgtttgatgatgcgattacggagttcgactcggtctcggaggactcgtacaaggactccacactcataatgcagttactcagagataacctcacactctgggcatcagacatacagtccgactccgtcgacgacagacaaaacaaacccgatgaataatctcctacatactccatacacttaatttatattttaagtatatttgtacaagcattaccttttgtaaagtattatgtgctaataatgagtccaattattactgtggatcataatagaaatattaagatttacaccgccaagggtagttcaatgtttaaccagataattaagtccggtggttgttgtgaatcagggggagttatctggacgactaatgatattacaaagtatgccactaaggttttcactagcatgagtggatatacagttagcgtacatcagataaacggtgagatattacactatggcagtcatgattttggtgcaccatgggagagagtttccaacaaaatacccctccatattgataatacatctagtaaaatttcttttgactatgtgcatgacggtgagaggaggattttcactgcgaagcccgggttcttatttatcaaagttctgatgcttgggacattctcagatcatgttttctgggaagcaaaaactgatcaggagtgttctagcaaggtggtggtctatggtgtagagtcaagtattaagaatattaacatattccagaacaataaccaggttaaacatttccataaggtgaaaagagattggatcacgacaactccttttgttcttgacattgacattaacaagaataatgatctctttgactatagatctaccaggggatttggccacttcaatcccaaagctaacttgacaatcactaggattgtgaagaaagagcttaagatatggtctgcgaaagataatgactatggtctcaaggtagtgttaatgggctctcgcaaggatgtgaaacatatttccattctgttggagagtggcaggtttgttctccttagcaagagtggtaagggtgatccctgggaagacatcactcaaaataaacacaatttctccggggtaaagttgttctccctagatgagggaacctcaaagtatcatcaacttactagggaagattatgaacctatagttttcgagtgtagatacggttacaaacttaaggatagtgtaaagtgtgtcatgataactaatgggaatatgttactgtggaaccacactgaggatcatgagtttggatatcctaggggtatgcctggatcttcctaatgatatccacagtcacacagtactctcacagtaatagataaataacacatagtatgaagtaaatatattatagtgagtttgtgggttatttggatgtgattgagagggggatgcgttcgatttggtattggtgtcgtttcacgtacataattggcacgccgggtatcttccgtatccgcctcttcaaatccttatcattagttgcaacaatgtaacacttgtgctaataacaaattaattccacaattattaaatactaaggaacggggagaaataactaacgaataaccagagggtaaataactgtggagtaggagccccgcagggctaaataagaaataactgaggggtaaataactgtgaagtaggagtcggaggattagataactcataactaagtagtgaggagggagaactaagtagtgaggagtgagctgtgtgagcgggagcaagcaccgtaacgtaccaactgaactcgttctacaatacaatcatcgacgtaagttcctttatgagtacatttaagccgtttaatcctgggatccttcaccaactgtaaagctaatctgtaacgatgccccaacttctccaactcaccaattatacaatccgtcacacatattatacctaaacattattacaatgtttttattgtaaaatttcactattttggaaataaatgcaaaagttgatcgggctaggatttaccgaggaaaatttcctcaatttctgctgcagtaactacacatttcgtaaaaaataattgtaaataataaataaatatcaaaaaggttgcaaaatagtaaatatctggggctgggtaactaagggtattacattttgagagtagcaggtccatcatggatttgtgaaggtcgagtttattttgaatggaggagttgacgaagttggtgtcgacaatgacctgaaacggcggaaccaaattctcattataattaaaaaacatcccagaatgaacaacatttctaacacattttattaactcagaaataattaacatacgattgtgttagttttgggccctcttccttcttctcaatttccttattcacccttctacaaataaataattaacaatattatgtaattttacgtaaaattaagttaaattaagtaaataaggggaaaaatacagtttgggatctttggaagagagtcgtcgtttaacctgagcaaatttccgcgttttcttagcctttccctaaaatcacaaaattacccaaaatattaatcactacaaattattacgtaattagtaaaataaagcgaaataaaggtaaaataaagggggaaattccgtaaactcagaaattaagtagatataaaaataaataccattatttgcgataaaatgtaaaaatgagagataaaactacattagaaaaatttataaaagtgttagagaaaattttggtaatttttttgtaggttgttgcggatggttttgatcatgttctggttggaatcgtagcatttcaccgcacaccgctccatctccacattcccgtcacccttgttcatattcacacatttctacaaattacattaatttttaattaatttacgtaatattaataaaaataattaaaattaatcaatttttatggtgaaaatattctctataaattaagttaaaataggctctaaattactgtaaatgggtaaattaagtgtataatagtataaatgtgtgaacttggtggcagttggtgagtgaggattgaagttggttgagttcggcttgtacggcgttcccaaattcttcgggctttttttgacagtttttaatacaatttgtaatttcgtctaaattctccggacttaagtcaaaacagttggtacaacattgaaatgattttttctgtaacggcagtgacatacgcgtgacttccgccaacataacatccacctcagactggaatcgctccgccctttcattcaaatttatcacctcaggctcccttttaaatttatcaaaccaactcattttttactcctttttatatagttacggtaccctatagggttgaccgtggaactggtattatttcacacatttccaccaattgacactgtttacagtattttacacattttaaccataaataaaaattaatttattgttatttccatgaatttgattaatttacgtgaaatgattttatttattattttttctacacattcgatggaatttattattaataattatttaaatcttttttatctaaaaaatttttataaattatcaactttaaaaataaagttcaaagttgatcgggttacgaaaataagttttctcacccagtcatttctgctgcagtaaccactcatttaccaaaaaataattaacaaatgtaaaataaatgtaaataggttgcaaatagtgtaaataatggggttaaatgagtattagattagggtattgaagtgatgagtaaattgcatcaacctgaacgaacaactcaacgtataaatgtgaggtgtgggtttacagacgtttcggcggtttgacgaggacgggtgcgggtcctttattcatcaaagctttatggatgtgtgggatgactccaccgccggcaatggtagccttgacgagtgtgtcgagttcctcgtctcctctgatggccagttgcaagtgacgtggcgtgatacgcttgaccttgaggtccttcgaggcgtttcctgccaactcaagcacctcagcggtgaggtattccaaaatcgcagaggcgtacactgccgctgttgatcccacacgaccgtcagcactcacacgcgacttcaacatcctgtgaacacgacccaccggaaactgtaatcccgcccttgcagcacgagacatcggtgtcttcttaccctttccacttcctacgttacggtgttaggtccaacgacaactttgttttcacacatattaactatctacccctagagggagctaatttactatagttaattatatacccctagagggagctaatttactgtatacccctaaagagagctactaaaatatatacccctagagggagctacttaactatataactatataaggggagagggagctacttaacagtgttaatatttgaacatctccctcttggggtacataacatctgaataactagtaaaaaataactaacaaaacccctccaattattaatagagataaaactgagtaaaaatttgcaagtgcaccacggtagcaatgatggtataattagctgtataaataaaaacggagtgaaaaaatgtaagtgatggtgtaccggtttttcctttaccgcctttgcccatgccaccgactttcccgccgattttgcctccaattttaccgccagcgtccatggttaagttcgagagcgcacacgtaggttgtgaaaaagtgatttgtttcggttaatttattaaaagagagaaaaaaaatccaataaaaatttcagtaaattattatttctatttcaccatcacactctctacagatgcatcccaataacatacccgacattcacaccaatcacactcacatacactcaatccccttcacatccctatactatctaatatattatcaaattatattatcaaattatattatttaatatatttaataaattatattattcattaatgaattaattgagttgtgagttgggagaattatttaattgcttggactagaattgttagtgactttctgttactttcatccactacgtcatgcgcactcaccgttacattctaattaatacattaattcctgttatacgggggagaaagggataaatagtgttaattacggtgtttaaggctccttctgctggtaaataatgtggtaaataatgtggttaacaattgttaatatttgttgagatacgaatttggcggaggttagtataccttgcacgattccacctataaaactaccacacgacatatactgcaattcctacacatttattacaccccactatttctcaatttgcaacctattggtattttatttttaatttataattattttttggtaaataagtggttgcagcagcagaaatgtttgggtgagaaaatttatttatcctagcccgatcaactttcaactttatttccaaattccaaaatttacaaatatttttcaataaatttgattaaaaaataattaattgtttgagactgtggagtgtgtagaaaattacctttggcattgaaatgtatttcgttatttgaaactctctatcattcaacatatctaaccacatattatacccgtttatacataataattatctaactctgtagtatatttcaagacaactatgtgttgttacattctttattgtcgtctcgttctttgagtagaaggcagtggtggttgaagagatacttccagaccgtcgttgagatgaacgtgagtaacgaaacgatgttagtaaacctcgtcgttatcttttcacgaacagttaaataatccaagatcctattccctatctccactcccataccactcaatctacaatattatttactatatccatattaataccgtataatactttattagtatataattgtggttaataatgtaaaaatgtgtgtaatactgtataaatgtgtatgtgtgttaactggtggtagagggagagggagctatctggatatatacccctagagggagctatcttactatactttactatataccccgagagggagctactttaatatatacccctagagggagctaataatataaggggagagggagctactttaactatttactatattaatggtatataaatatggtactgtgtatttggtacatttgggtgaatggaagatccttggaggagttggtgagagagtactgaacaatttccgaaaataaaaagctatacgcgctcaaagatacctaaaaaattaataaataatttgtggaatctttacctttgatttttgctttatcaacggttgctccaggatattcctactcctcaactcatccataaaataatacaatattaaataataaaataatatatagtaatgggtatggatgagaaaaaaaaattaaggtggtaaaaagtgaacaaaaaaaccacctgcgattggtacacccaccatttacatctaacaatagtaatactgttaacaatagttaagagtatagagaaggatcgacgtgtgctggtatcggctttatctccgtcgctaactcctcttctattctacaacaaacattaacaatttactatacttaactatataccccaagagggagctactttacaatacctaattatatacccctagagggagctaattaactaattaactatataccccgagagggagctacttaactatatacccctagagggagctaaattactacataagggagagggagctaataactactgtaaatagtacccctagagggagctaattaactatatactatactactatagtatactaaattggtatcatacttgaagagcgcttctttatcttgttctgtaacgagattgattgcgagtccgaggtgtccgaaacgtccggacctcccgatcctgtgaagatacgtggacgagttcttgggaaagtcaaagttaaccacgacgttgacaaagcggaagtcaattcctctggtgaacaaatctgaggacaccaaacacctacaggcgccattcctaaaatcgtgaaacactctgttcctatgcgactgcatcatcttcgcatggatgtagaaacaggagaatcccaactccgtaatcttcttggccagtagttcaaccctgaccactgagttacagaagataattgcttggttaatttgtagcctggcgaataaagttgacaggcagtgaaccttctggcgttcctcaacgtaggcgtagaattgtgtaatccccttgagagttaaatcgtccatgaggttaatctcatgggcgtttggcaaatattgttccttaaacgcttgaacactcgctgggaaagtggcggagtataagataatttgcttctcagtgggaagaaacttcaacagggcctccacaatcggacagaattcctgtgataacatcttgtcagcctcgtctaagactactgtggaacactgggataacaccgcaacgcccttgttagttaagtctaaaatacgaccaggtgtaccacagagaatgtggacaggtttatacaaacgcataatgtcgttacggagcgaagtgccaccagtggaaaccatacactggacctccaagtatttacccaactccttcaccaccgcactagtttgcaatgctaactcacgcgtaggcaatagaattaaacctatagtcaatagtgtaccaactatagttaagtagctccctctagggtatatagttaattagctccctctaggggtacataaagtagctccctctaggggtacataaagtagctccctctaggggtatacaattaattagctccctttaggggtatataaagtagctccctctaggggtatataaagtagctccctctagggtatatagttaattagctccctctaggggtatataaagtagctccctctaggggtatataattagtaatgtgtagttaattagctccctctaggggtatataattagtaatgtgtagttaattagctccctctaggggtatataattagtaatgtgtagttaattagctccctctaggggtatacagttaagtatagttaagatagctccctctaggggtattagttaagtagctccctcttgggggtatatagtaaagtagttaagagtggattaccttgaatttgtgcttctgaggtatcaagtttctggagtaaaggtataacaaatgcagccgtctttcctatttcacacatcaattatatatattcaatagtattatctaaggggtttagtaggagataaataagaactcccggagaactaagtagtagggagataactaaggaactgattattattgagtaagttgtgtgattggtagcaagcaccgtaacggggtaaaaaatacctgtgccatttttggctctggcgagaatatcatgaccggcgagagcgataggaatactttcctcctggatgggagaaggacgctcaaaacccttctcaaaaatacccatgagcaactcacgcttcaaaaaataatcctcaaactcactacccctcgtcttcgtcacatcctaaacatatttacacaactttatattattaacagtaaattaacactaatttaagctattttagaggtaaatttatggtattttaagactattttaggggtaatttaggactaatttagaggtaatttagggctatttttaggctatttttaggtaattttaggctatatttaagctatttttaggtaattttaggctatatttaagctatttttaggtaattttaggctatatttaagctatttttaggtaattttaggctatatttaagctatttttaggtaattttaggctatatttaagctatttttaggtaattttaggctattttagagcttatttagtactatttctaggctatatttaagctattttagtaatattttagtcatgttttagggcttatttagcttagttttgtactattttagctctattttatggcatttaggggctatttagagttatttagaggctatttagagctatttttacatattttagaggttattttagtactatttctaggctatttttacatattttagaggttattttagtactattttagggactgtttaagggcattttagaggtaaaataaggattttaatgggtaaattaagcccaaattagagccaactcaagagaaaaccaaggtaatttaacactaattacggagtaaaagtgaataactaacgggtatttagagtggattacctcagttttatagcgtttgtctgcgtttttatcgagaatatctcgtttccaggcgggatcgacactcgtgtcgtttttactactcgacgtatccaacgataaactcatctcagtcctccacaacacaatacattaaaatttattctatccctccaattccaacaaattactcaattttattctattctattctattttattttgtttacaaattattttgattatttacaaattattttaattattaatttaataatttggtgagaatttgtggataaattaacgaatttgtaagattaaagtttaaattactgaaataatttgaaatccggcaggggtaaaactacgataaaaaccttgtaagagtaaaatttggtttggtggaatcagtcaaaatttggcatgtaaattttatccaccgatcccatccgttcacttaaacaacaaactaaactaatactcgaaataaacttttaataaaacaaaacaacaaatctcaacaataccctcacagtcgggctcaaacaaaaataacattattttccaaatttatttacttcaacattaaaattcataaaataattaataaaattagtaaaattagcaaatttggtaaaattagtgaaattaatgttttgttagaaaaagatgttaggtttatttttattgaagttttgttcgtagtttgataggatttggttattttcgagaattctgccggagcgccggtttatgaaggtttcccagtccttgatgtcattaatcctcatcatcttgaccacgccgtcgtccgtcgataccgaaccgtaccaatacctcctcatcccgccatctaataaattattaaattatttccaatcaaattattaaattatttttcattaaattaaattaaatattgttgtgtaccgtttaggggaacgtcaatttctaaaatgtgaaatatatcacttttcatgattaaagttatctaatgttggatctaagtatgtgtgattctattcgacacgttccataacctaagagaaaaaattccataatctaagagaaaaaattaaactaagcttaagaatcggttaaatttgtgttttctcgagattgttcaatattttgaaaatttgcgattcgcacccttgacagtcattttatgcaattctacactttatccttccattaggtaaattagttaattacactttttcatattttatatacatttttacacttttatttaaccgttacggcgctgattttactatataaaattcaattttgagcatttactcaaatacttcaaattaatccaatttctgtcaaattattccaaaatttgtcagattattaaaatttctgttaaattacttcaatttctataaaaaatgtttttaaaattaaataaatattttttttctagtcggcaaatttgaccttaaaaatctgatcaagatcggtgcttgttggataaaaatgaacacaaatgtggttgagcattatattgactatagtgacaacttataccagcagtcccacaacactgtaaatacccctagaatcggtccgaatagacttcgaaggagtaagtgacacaactgttaacactctgtagactcgagctttcctgtgattttttacagaaatgatcaaatttccagacggaatcgaaacaacgaaccactctcaaccaatcgccacacaacaccaaatcgacaactctcatcaccaatccctaacgtatttcttacttcatttatttacttagttcatttcttacttagttcgtttatttacttagttaacaattagttaatgtgttaagattgggattagataagcttgacgaatcggcattcggagataatgcgaatccatgaggaactttcaaggtaccacaacgtaatacagtcgcaactacgggtaaaatttacaactctaacacctcttcagaactcacccacattcaactctttccaacacattaacaccgataacggggttaatgtgcacggggttaaccctgttaacggtgtgaatattgccagagtaaatggtgtgaaccctgtcaacagtgtgaacaatgtgaacagtgtgagagatgtgaggaatgtgacgcctcgtaactctattggtaatgattacatttttgtaacaaatggtagagataattcccgtgtgaatagttttgacacgcgcagtttcagcaggattaacagtgactcgcacttgaacctgaaccagatttccacaattccaacccagtcaatcacattagtagagcctgtggaacttcagttaccgcctgaaatcatcgaatccttccctgtcaatagttttacgtcagacccactggagcttgacgagagcctaagatcttgctctgtgtgccttgaagagtatcagcagggcacggaaattagaagattgccctgcacacactcgtttcacaagaactgtatcgatacatggctcaggaaaagcaccatctgtcccatctgcaaattcaactacatcgtcatgctacagatttaatattctaactatatatatattatatatattatatactatggtatatactatgtatactatggtatattatatatagtatagtattatgtgtctgggtttatggctagtaaatcaggtgtattacacagtataacaactctattatacattatttaagcctattacaaccgtattgaggagtattaattggtgtatagtactggaataagttttatcttagtgtatactaaagtatataatacactacaatactcttagtactacagtatacatatactcagtaatatacctaatacctatacctataatactatactataatatacttctaatactataatatacttcttagaatactgtaacactatgactagaatattataatactatgactagaatactataatactatgactagaatactataatactatgactagaatactataatatacttcttagaatactataacactatgactagaatactgtgtaccctaactacctaatactatactactataatactatactatatataatatactatattgtatactatgtatactatgtatactatgtatactatgtataatatatgtatatgtatagtactaagagtatattaaggtatattaatagtatactattagtagttgttacagcctcttcaagggtttaaatggtatagtttagagttacttatctcttaattatggattatttattatttcttaggggttttaagtggtattggtgttgtgttttcctgtgggtattaggtgttacgggtaactctcaacacaatcataataattgggaaaaaatgaattttatcatctttttactgtttattaacgtgtttataaaagtttccaggggtaacaatttgttaactcaggatatcccgggtactagtaaactaactaatctgcacactgacgtggataataattgcagtggtattacgggagtaacaaagtaccatgacgaattttgcactgtggaatgtgtaaaaatatttaaaaagtgtgcgtcagaagcaaatgtcataaagtgcgtgagtaatctcaagttgtacgacaaaagtgccaatttattctttaaaaggtgtaaatttactccgaatttacaggccaaaattgataattttgaaaatattatcaccaacaaatgttttatcacaagggcagtttacaggaattcctggctcgacacacagtcacacagctgccactgcgcactctataacgccgaaccctgcactctagacgatatacaaactatcaactatgtcaattctactgatagtgttgacagtgtgactcagggtgtcaacagtgtgattgagggagtcaaaattgtaagtgagagagtagtggaggaagtgattgaggagttgcggggttcgggaatatgcccaaaacttaattatcctcccttggtaaaggatgataaatcaatttacaccgttgctctggcaaataataaacaacttcactgtccaaagagtgacaatttgaaggattggaaccctccgataagtaatttgccagacgaacagttaccaaattactgtaaaaacggccccgtacactccgataacactgaaggtaataaattactcaattaaagtgtttagagaaggaatttgaatgtgctgacgtgaggggcgtgggaacggatttggacactgagtgtatagacttgtgtgaagagattgagcagcactgtgagcagtttgacgcaaatttaatcagttgcatcagggacaaattaacacaagaacaagaattcaacaaactcaaatgccaattcggtaaaggtctccgttacggtgcttgcactcagttatttacttatttatactcatttatttactacatagttccttagttacattagtaattttatttaacattttacacattcttacacattcttacacatttttacacatttttacacatttttacacattcttacacattcttacacatttacacatttttacacatttttacacatttttacacattcttacacatttacacatttttacacatttttacacatttttacacatttttacacatttttacacatttttacacatttttacacatttttacacatttttacacatttttacacatttttacacatttttacacatttttacacatttttacacatttttacacatttttacacatttttacacatttttacacatttttacacatttttacacatttttacacatttttacacatttttacacatttttacacatttttacacatttttacacatttttacacatttttacacatttttacacatttttacacatttttacacatttttacacatttttacacacacttagttacacactaaataagacacgtttacacatttttacacattttatttagttaaatttagctaattatttcataattaactgaatgattagatgttggcttgactgagatatgcactgaactatttaaggcgtcggataatcaaatcgagtgcctaaacctctgcaatttcaccaaggacacctgccaaatccacaccaaaccaaccaaaaacacatgcaaacatacactgttcacaattcaaccgtctaacaatgttaaaaatgatcaaattcggggaaatcagggaaacaatgggcaagaggaacccgttgatcccgtggtaacccctgaaatcaagagcaaagtgaacaattttaacgagaaatgtaagtttgtgagtggaaataatttgggatttggttatgttttatgtaaatttaagagtgaaatttgttcatttggtgagtggtctgactggtcagattgcacttccaactgcatcggatttgatcacattcccactcgttacaggacacgtaaaattattaaccccgttcccccctgtgctcgtcaagccctaggcacacttgagatacaaatttgtacacacctgcccaggtgtaactccggctggatcaccacaactcttgctgcacccgttgtcaccagagtaacaaaaagtaattctacaaatagtaaaccctatcccgactgggtctattacgctctagaacagtatcccaatctcgtcaacggtgttggtgatggtgtaaatgacaccagcacacccacagcagacactcccaactctaccaatactgctgctaacagtaccaattctgctgctaatactgctaatagtagtaatagtaataatagtactgctaataatgataataataatagtgaagagtgggagataagaaggagtgtgcgtgtgacaacgataaaggagacgaaatgcggctgtcctaggcgggtcaggagtataagatttagtgagtttatggaaagcgaggggttaattacggagctacgaaaactatgtaaactaaataaaaataatcagttagttttcgagagcgatgccaggtatgtgtaccactgtaacttggggtttctactgaaggaagtggagactaagcatataaaatgtgacgaggaagatagcacagagtatataatatgtaaaaaggtaattagaaggatcagaaaggaccaaatcacactcccggcaattgccgtaacactgggcgttctcgcactaatcctagtcactgaccaaattaacaaattttataaccgcaaaatgttctccaaacggaaaaatctgtaatgccacaatgccacatcacacattcaccaactttcaatttttccaattttttcaattttttcactaacttttcaattttttaatcaattaaataaaattaaataaaattaaatattttgaatattttgaaaaatttgttatgtgatggtatcagttgtgttgagtggattccgtcggatttctgttattcccagtcttaaattcttacctctgagggcttcagtatttaattactcaagtcatcaccatgaggagccgccgcactacgcctaccgcggcgacggactaccagacgttaaatgcgaagaactacaacacatgctccacctaaaccagaaactcaccgaaaaaaccgctcaacaaaccgagaaatttggcttacaaaatgataatttaggtttacaaagggagaaaacgggattacaaagtgataaaatgggatttaaaactgagaaaacgggattacagatggaaaaattaggcattgaaggtgttgacggtcagacagaggaagtgtataatgagttaaaaaatttgtttgctagggttttattatcgaattggcacgacactgtgcagttgacgatgaatatggacatttgggctggtaattttgaccgtttaagacgagtagccagggacataccacacgtgaagttacaacagcttttaacagaaactaaagaattatttgacgttttataccaagtggaagatttacaagatcacctctacgagttaatggaagaattagccttaaacccggaggtttcggggacctttggaggcacaaactataatctccacatcaacgaagtagtaaagagataccacgagttaaagaaaagttatccagagtatacacagaaacttaaagaatcgctagggtacacactagccatcatgagacaacggtacactttcaactggcccgaagaacattcttacttttattaatcactcaattttactccttttttacacatctttacacttttttacactttttaacacttttttacactatttaaagctgttttaatatattaaaatacatttattaaatcactatttataccatttttatatatatatattatattatatatattatatcactatttataccacttattatatatatatattatattatatatattatagtatatatactatgtataatatgtatagtagtaagagtatagtagcataaacatagtacattcaattacattatttaacacttcataacactcttaacaacactaaatactgttaataaacactgtaaatatcatttataaagtgttattgaggtgaattaaaatgtaaactaaacactcaaaatccatgtgtaagaatgtgctagccctaccaatcctaacttgataccaataattaacaataaaattagtaataattatggtccgaaaggagtatgagcataaggctaagttggtgaatggattaccagtgttatattgtaaatttggtaagaataaaccctgggttaacattacctcctcaaggtttaagattacactttttacctttatcgattctgacaatgttaaacacaatatttcagagtgtgaagtaacacttaacgagttggtggtgaaaatagtgttcaaatttgaggtgaatgagattatgtttgacgacgtggagagttggcggttttgttactgtttctggtctgggtatccgagttgtatcctgtttgaccttgtgaaaaacgagtttaaactagtgtttgaccacggaattgagcgaattctggacactaaaatccaatacataggcccagagtctggcggcgtagtggacatttcaaaggattccaaaagcggttctaaacctggattagtccttacaattaacgtttttgacgagaaaccaagtgttataacggctggacctgagctactttgggaacggttaccaggtgaacctgtcgctgagaggatgatcacagataaggaaactgacgaaattgtcatcttctgtaaggatagatactttgtctgcagaagagaaaatggtaaaagatcacgcgaagaacataaactcacacaattccaccatgaaattatcaattcgttcatacgaaccaaacaaacccataactaatatactatacataacatacatactatagtatatggtatataatatatattatagtgtataggtagtaggtgtctgggtttatgagtacttaattaggtgtataattgctatagtacatactgtttccagagttctaacatactattaaagagtgttaaggagtattaaagagtatttagtactggaatcagtgttaacttactttatagtgtgtaatataccctaggatactcctactattatacatatacaatatatactatagtatattatatatagtgtagttaagaatatagttaagtatctccctctcccttatatagttatatagctccctctcccttatatagttaatttagctccctctcggggtatatattaaagtagctccctctcccctatatagttaagatatagttaatttagctccctctaggggtatatagtaatttagctccctctaggggtattagttatttagctccctctaggggtattaattatatagctccctctaggggtatagtaaatatagtgtgtgttatgtaatgtgtaggagtgatacatgtataggactgagattatgtgtaattacacacgattaaacaaaagtcccgtttgtttaataccaaacaatttaaacattaaatcttaacattactcacggagtaatcttaaactggtgatggtcctagtggagctggtcccgctggtactggtggaggagagtgtaacttaagtgcgtgcatgagatgatgtgctggaagtccttcaagatcaggaagaccgggcattaactctaaaacaccaacgacaaatccgggcataccaacaggcttaggtgcggggggagttgcggggggagttccaccagtaggagttccactagtagtagtagtgggaggatcgaatttgaggaacacatggacgggaccacccaaaggatgtaacagttccaagtgtaaaaactttttaccttttggttctcctacaaagtgtaagtccaagagtacttccttgtcagctcctttccatacgggatggttatcacagacaacttcgttcaccatgttgtgaactggtctgacccaggtgaagtatttctcacccttcttaaaagttttatggaggaatactctgtctgggagagagccaaggggacacttaccctgcgggtcagttgggtcaccttcgccatgttttccccaaaggggaaatccgagtggtttcaagtcaagttttccagggtcggcgaaggccccggggaagaacacagtggccagggccaatataagaaacttcatgattccaactattaactaacagttaaaagagcaagttttagttgtattccaactacttctttcccattccggatggggaaatttaacacattcctccccatccaaacctacacatttctcatctttctcctccttacagtggattatcactatgaaaatgggtttagaaattattaaactcacagaattacacttgagaataaaaattttagcactgaatttgcctaaaaaatgttaatagtataggttgtttgggccgaattaagcagttttcagggtcaaattctgacactagatgtaccatttacccctcaatatttcctataggtacagtattttatgtatacagttaagagtatatagtattatgagtatatagttaagtagctccctctccctatcactttgttacttagctccctctaggggtacagtaaattagctccctctaggggtatctagtaatttagctccctctaggggtatatatttaagtagtaaaatagctccctctaggggtattagttatttagctccctctagaggtattagttatgtagctctctctaggggtacattggttaggattatatagttaagaatgagattaatgtttgtgtatggaattcccttctgagatgaggaacattctgtcattgaagaggtcaaacctcttgacaaagttgtttttcaggtacaaattaactttatcttcgagtattttaattactatttcctccagttccgtcatttccttgctccagatttcctgatttctgtagagtaatttgtgacactgagttctcggaattatgctaagttgaaacttggcaaagtgagcaatgatgtgcgggtatctgatctccagaccatccctgtcaatcatcttcagattgtccaaactgatctttttacgcgttatttcctcccagtttctcctttcagacgtccacttgtacaggaaatagtcgtagttgtccctctcgcccaggagatatttagtattaaaactgtccaacaattttaccctttttactgattctttctggtcatacgttgaccaaatttctctattcacaccgggaccactgggagaaccactgagagtactgtgactacagggagattcgctaattttaacgaattcgtaccctgggacgcatgagaattcgacgagtttgtcaattttcctgtagttatgtccccgttttgattttcgctctgagatgttcagttctacaaacttagtttcgtcgtctgagtcactgttgtacctgtgataactttccgtatcatctgataacccctccgaatcctcaaacgtatccgtctcactctcaatcacagatttctcactctcatccaatgtatcatccaacgtctcatctgatgtcacactctgctcctcagtattttcactctgttcctcagtattttcactctggtcctcagtattatcagattttccctgagtatgttcatttccgtgagtatgttcatttccgtgagaatctgaagttatgtcaggagcgggagtgtcgtaatcatgtccagtttccgagtcggtgtcggtttcgctatggctaataaaagtatattctggactgatattagtctctggtttactgagtagattaatattattgacaaattcgtagtattctggaatttgcaggaaaggtctcctggtcatgatcctagagtttacacgcttaaccacgtgatccaacttgtggtaaaacagcttaatatgtttaacactcgagtttaaagttactttaagaccactttggaattggatttggatagcattttccaggagattgtactgcaaattcctggccagtctgtagccaaacttttccctcaatttgtcatcaaaatgaaagtccaacacatacttaaactgattcaaataaacaacatatttattggtcagttgttgcacgtagtttaaatcagtttcatcttcaaagtagaacctcaattccctcatgttaagcctggattctgtgatatcttcccatttcccaccctgatcccatataaacaatgtgtaattgtagtttttatgtaaaattgtcaagtatttcatgttggagtatgtgcacactgagacttcataggctgtcaacaatgtgtcctgagtttcccaaattactgtaaccacacccgtgtcaggattagtttcaacaactttgctgaatagtaacactgtgacagttttgtagtcacggaaattctttcttaatatcgttttctcctcaggagttaacttctcataactactggaattctgaattacatactttgacatgtccaaattcttataattacttatgtcaactgttaggttcttaacttctttccattcgaagttaattttctcaattctcttgaaatcgccgttgactaagaacaatgagacggcagtgatctcatgggagaaagtgtactttattactcttgtaacacattcactaatgttattagccttgtaaattgattgtaaaatcggaccaaacggtgacacttccacaattgtgtcaaacatgaacccctccttggcaatgtattcctcagagttttccctgtccaaatgctcaaactcatttgtagaaaattcaagtcttaaatctaacaccgtgggccttaggtcaggctcgtattcagtcagtttcgggctcagaaatccgttgtccaccgtagctcccagtttaaacatctgttacataattaacaaagtaattatttacttacacataataatattagtatcagttgtgtcagctccattttacacacagaaatgttaattttattctatcaaatgggtttaaaattgttatagttattggaagttaaggtaaaagttgagctttttaatgtgttaaagtatttgttaacagtttgaaaatatgttttcaggtgtgtaggtccggtgactccgacacatcaccacgcactccctgcattattcataatttcactcaattttccatcaatttcatcttctaacactaaattaactcgtgtaaatgttactatgagttggtattgttaccagtggatgtgattggccagtcaagttggtgtgtcctgatgatactcaccggattcggtaaaaatattgttaaaaatgtatcagcaagtgattcagtttggatatccgcaatttcttgccatcctgaggaatggtacagcgtaactcctcaagatgtgacattgccaaactttcttcacagatactgacaacagagtgtataattatgttgagagtgacgtagaattgtatgaactaattgttgtaactgagtttaagtttaagtgtaaggtctggtatgacaagagattatgctggtaattaccgtcggatgctaaggaatttcctaaatatttagcattccacctgagatacaatcaaatgtatcttatgttctctaaattaaggatggagagactggatttggagaatccacaagttactcctactgtggtagaacgtcctgtgtctgtaaagagaacaattcaatgtgacaatagaacagttaaaaaggctaaaagagtgtgtaaaaggaagttaactacacctaaaactatggttgagcccagtatagaggaggtggacggtggttcaaaactctaaatctagtcactatactacatactatacatatatacataatgtatatcatacattatatacatagtatatacatagtatatataataatgtatataatgtataaaatgtgagagtattacattttaagattagattcgagagaattgatattcctaaacattgttagggtgtttacttacttgagtgaccgttgtatgtatctggcgttgattttgatgtttgggaacattggcacgaatcctatggcaactcctgcaaaacaacataacagcgcctctgtgataattgcgctcactgaccctgagttaattgtgccaaaaactgctccaacttcaaggccgctgatggcgcccactagcatgcccctcctgcccaaaagtaacgctgaaactgagagtagcatgaaactaaatcccagaattatcattgaataattcataatcacacccatgaaaatgccaaataacattcctaccaatgcactcaacatcaaccaccagccgcctccgttcatatacttcctaccaaatccctaaacaattatttgccacattgtaattttgttgtagtatgttggcccctgacgggtcaaaactgtgtcacattgaataactgtgtagacagtataaaatactttggagaagagtgaggatgtttgtttgacgacgatgacgaggatgaaagtgttgagaatggcaatgactgagactccgataatattactttgtgtccagagtaacggattttcatattccaaatcacacaatgatattaaactttctttcaacacggttttacccagtcttacccatttccccgtattccgtaccagtttcttaagggaattaacactactgtttgaaattttaccaagggaattaatactgttggagttgtgtgtgttgatatttctgagattaaggcagtggataaaagtattgaaaaataaaattaccagacatttcattatttattttctcacccttcagcgctcagattcacttgtacttttcagactcatacatcttaattatttttacacattatccacagagaagtaacaaatattagtaaataacaaatattagtaaataacaaatattagtaaataacaaatattagtaaataacaaatattagtaaataacaaatattagtaaataacaaatattagtaaataacaaatattagtaaataacaaatattggtgaataacaaatattggtgaataataaatattggtgaataataaatattggtgaataataaatattggtgaataataaaattagtgtgagagattaattgagaagtgagatgtgtttgattttgtgtaggtaggttagtagtatggaggaggatgtgatgcctaggaatgccatgaaagaggccatgagaaacacttcaagtaacgaagtctgcccggaacagcttataaacgtcatgccatcgtcctcattacataactccttcaccgactcaaagtcctcctttatataactcaacgataaacacgaatatctacacaatattatcactaattatacttatttagtactaattataggtaaattaagggtaattaaggggtaaattagtactaaatgtgactaaattgaggatagtaaagataagaggttgcgcagaaaaaagagcagcaagaaaaaaaatttcgctctcggaccagtctactccattgactggtcctcgagttctctaacccagttcccagtaatatagttaagtaatattaatactatattaatatagtaagtagttaagtagctccctctaggggtatatagtattatgtatagtaattgtagtatagttaagagtatataataaagtacccctagagagagctacatagagaagagggagctaagtaatgaataactatgtgagcgtttgcaagctccgtaacggagaaaggtccgctaaaagggttaaataactgtaaaactagaacccccggagggataactaagaactcccggaggagaaaactatatacaataaatacaataggggtaactggataaatctgtgtgaggggatgcaagctccgtaacggaaacctgtagaatgagttacgattgagaaagagaatggatctcattttattattgcagacgagcgagagttgcttattccagtccctactcctcaaagattcctctatactacactgaatcatcccgtaaggacaactacacctgttcctctacaacacctttcaacaatattcaattgttttactattcaattgtgatataactgggaaatttgaccaaataggggaataaaattacgtctaactgcggtagtaggtgaataaaactgattagagaggagtattagacaaacttgtataatgagtttggtgttttgtatttgcttctggcccaaatatattctacaatttatcccaccctccccgtcaacaacactatccctcagaacaactgaattatcaacagtattatccacattattatcattagcaacagaattatttacggtgtcatttgggttgacaagattggtgaggatgattcttgagaatttgtgttggttgtcatcggaatcttgacccagctcggtgacaaatgtggttgggtatatttgaattagtttactaatgttatgacatgatttacctccggtaattacgttcctgaaccttatcctgacactggtctccaactcgttcattaccctcacaatcctctcctcatccaaaccctcacccagccgcgacaatttatcaaacaatttatcatacaatttatcatacaatttctccacaccactcaaattaccacttctcacattacttttagtattattatgtacactatttacactgttatcaatttggttggagagccacttggaatagtctgagaactggcaatgaatttccttgcagtaaatcaggccatttccaataatttttcgttctttccgaaacccacaaccaaacccatatacattttgcaacttctctcccttttgcaactcttttacccgtcgattgaggcattttttaacgttgttttgaaaagtgtgttcgagtatgaatttacattctgtgacaatattattaacggtggtgaggcataagttgtgtaacttctcgtcgatgcagatggcgtcgattaagtgtgccacggtgctgatgtcgtcaatttgcacacttttatagtacttttccaggtaatttctaaacactatcacgtcaaactttgtggactcttttataaacttttttaaacactttatcaactccaactcagtcaactcagacatctcactctcacactctttctccatactctcacattttttcacacagtccgctattgatactgtatagttggatgaataattgccaatgttatcacagctgacgtataacaattcgttactgagtgtttcatagttgacattaccgtttgagcaatagttttctagttgtgagtctgaggaaaagaagtcaaaagttggcactttaatatatcccaacggtaccaccagacgctcatacccactcaatgatacatgctcctgcatcccaacccctaaaataacattattttactacttttgaggtaaataaggggaaattaatgctaaataaagctaattaagggtaaataaaggggaaattaatgctaaatagaggagaaattggggaaaagttgagagggaaatgaggactagaacacaaaatttcgccctaaagacacacaaatcgtactataacacactactacagtacataaatacataactaagaaccctaggagagataactaagaggccctgggatgactaagtagtcaggggaactacataactaagcgttagcaagcaccgtaacggaccactaaaatctttattgaatacttcactactgttgcaaggaattgtattttctggacatatgcaactcccgtccctcacccaactctcgccatcatactcaacattgtacatcaaacacatttctacaccctcttccacattattacccaatgtattactcactgtgttatctactgtgttatctcccacactatcttctactgtatttccggcatccctactgttagaaattgtgtgtgttggtttgcagggtttggttgtggcggggcatttgatattgagtagtaagtgtctgtgtccgttggggtcgttatttggcctatcgcaggcggaatagttaaaatcgtaatcgcagttctgatcatactctgaaacttcataaatcttagccacggtgattaatttgtcgcccaaatcgatcctctccctcttcatcttacaaccaacgttccacacaaaaaaatatctacccctctccacaccattcactcctcttctatcaatagtaccactgttgacagtgttacctccaactgtgttactattgacagtgttactgttgacagagttgccatcacgagtgtttacagtgcgataatagcaaagttggttgcagggtaggattttgtggcattcgacggattgtagagtttgatcatttgagtgtccggagtagtaaactaacctccttctaatctttattgacatgctcacgtcgtcgttacagatcttgctgcactcactccactcactccattccgaatacaccgaacccattctcaacgtactaactgtgttagtagtattagtagtgtcactagtgtcactactgccaactgagttcactgtgttaccactaacaattgtgttattagtgttaggagagttgttattgtctacggtacgaattctgttgccagtgttaaaattgtttacggtgttaaaattgttgattgtgttgatattgttaattgtgttgttgttgttgatggtgttggtgatgaagtagtgtgtgagaatatcatttctgtactgtaggacgaggtgtgcgagtgagacgaggtttaggatttcgcagttttccgatttggtcctgtagcagctgaaaaagtgacttgtgtcaccttgaagacactccctcaaatatgaagagttaacacactggtgataacagttgcgcttactaatgaggtttacacggcgtacgtacttgcaaatgcgcttaatccagacaatcacactgctctccagtgtgattatgttcagagtcacggcggcgtcagacaccttaaaacgcatcaagacgtcatagtgaggaattaactccaacatgctctccctattcagaacactcgcaccctcaaatcctacacatatttttactttattttataaattttcataatttcacattttcacattatttcacattaattaattaattatttaattattaatttgtttgagatttgaaatttcggtctgtgggataccgttgagagtgacattgtgtacggtgggatctgttattttatgtactggcgttacaaatggcacggagtaaacggtcaacttcacgtctctgacgttggtttgtttatactttacttcattctcgtatagcagggtggagtcagttctcaccttactaatggccaggtaccctaatttaaccctactaacccgtccccgggactctaatttaacactattatcgtcatgcagtattgtagttacgattacgtcagtttgactcttgagtactatgacccaatcgtctgcaggatccagtggtaacttcacagtctcatccgtggatatttttattaacccgacgacaatttgctttcccaactctgttgagtgatttccaatactaattattaacacgtcggcgagtaattttattctcctgttactctctgctacacagtgcagtattaaacttgctgctgcactggtaatgttattaacaagtacaataatgttatgtacagtgtttaacggtgagataattactatcggattctctatctcctccttatacctcaactcagtccactcatagttatttatctccacactctccaatatgtattctgcaaacaagtcagcatatttaactattataactgattttgatcaattttaatgaaaaatattcataaattatggattttggaaataaatgtcaaagttgatcgggctaggatttggagaggaaaatttctgtcattattgctgcagtaaccacttatttaccaaaaaacaattaccaattgtaaataaatgtaaataggttgcaaattgagaaataatggggttaagatgactagtgtgagggatacttggtttgagataataatcaagtttgaaagagttatattcctttaatttagagtctaaaatttattagtcagattggctgttaagtgaaagcgtacctggaaggaatttgcagatgttgatatcatttcttgagaacattttagcgaggcacatgagaaagtgttccctgggcactaagtcataccgtgacgtgcaactccggacatagttcagacataacatctgacacatctcctcatcacccacgtccactccataaaataagccacagtcatatcccaacactataaattacttattccatcaaattatcgtgtaattagttgaaagttgatcgggctacgatttactgaggaaaataattcccatattgctgcagtaaccacttatttaccaaaaaataattccaaattgtaaataaagtaaagaggttgcaaaatagataattagtggggataagataactagtgtgagtattgtcacatttgatgcaagagaattgtatatatttgaagtgaggtgacttatctgtgcattgtttataaattgattcattgagtttgcagtagtttttatgtctgcagaggttccaaacctcttcagtcacgtccaattcagcgtgattacacttgataaacgcattcacaactgtaatgtgatgaccgtacggacaactaatctcaggcaattccgacgaatctattctcaacacagcatcaccggccgataccacgtctgatcaactataaactcaatttacaataataattataataatttaataataattatataaaatattgaaaatgtgtgggaaaaaacttttgtgtgtttgtgagttggaggataaatttctgtagaaagaattaaaaggttaaactgactctagtgaaacagggttttgtactttagttatcaaaccactacaacaacataagaaaatgtgtaaaaatattattatcatttttcgcgcgataattaattaatttaattttaaaaaatttaaattttatttttttcatttttactcaaaatggaacttcaaatttattaatttaccactcaaattctccatcagatttcctcaacttttcgatcagacttcctcaacatttggccaggattcccccggattctgtcaaaatttgctctggattctaacaaaatttatgtcaaatttctaaaatttcgctgtaaaaggttaaacaaataattgagataaacttatgtaaattgatgaaaaatgttaagataagtttaagttgatggcagtaccgaagagtaaaagaagtaaaagtaaagtgaaacaaagaacaaatataattttctttgaccaactctgcgggaactggaaccgacgacgcgaatggtaattttcacacattttccacacttttcacacatttttccacttctaacagtagctaaataacgtaaataaatgtaaattaacgtaaataataacatgaataatcaagtgtgtaatgtgttgtgttaggttttatagaagattgaggatagagaagtatcttccgagtacttgtgatcctaaatttacgctcaacaggcccgttcttttccccggattctggtcaacgtaacgctactttatataattacatatttactggtggaaaatgtgaattacaggtttctgatgactaatttgaaaaagtcactaaagtaattttctcacaattctctcatacatacaattattaattaaaattaattatatattatttgtaaatttgtgtgtttattagtgtgtttattagcgtttggaatccccgtggggactcaaatgatataataattctaatttttagatgaggattttaaagggatttttaaaggcattgcccgattcacgagtgaattattttaactttagccagtcccggcacctaggacaagctccccaaggcaaaaatatcgagaacgtattctaactctattactttgtttacttagtcttatactatagttagagttaattagtgtaaaaatagctccctctaggggtatatggttaattagctccctctagggttatatagttaagtagctccctctcgggttatatagttaagtatagttaagatagctccctctaggggtacagtaaagtagctccctctcggggtatatagttaagtatagttaagatagctccctctaggggtattagttaagtatctctctctcccttagatagttaagtatctctctctcccttatatagttaattagctccctctccccctattaagggtttacccattaatacccctagttatccataaatatactcagttatacatctctaatacaaagttgtatataatgatttagttggaatcggcttgggaggagggtaagaagttattttaccgtccgtcgttgagttatcacgagtttgccaagcgtgtggagtgtgttcggttatttgtgttttggggacttgtaactgggcttgcgcttgattttgtgttccgtcctttgaaaagcggttactggttcagttggaacctgagggagcggttttcaaggcctaaagtcacgactctaccacaactccaagatgataacatgaccgacgccactcgagaatataataaaatttgtaatttttaatctccgccacaattaacttacacatttacttatacaatttacacatttaattatacaatttacactgttaattatgtaatttacacatctaaaatcagtgagtaaaaaataattgtgaataatgggtgaaaaaaataaatgtcaaaagttgatcgggttacgataaataaattttctcacccagtcatttctgctgcttcaaccatatacctcagtatagtataccatagacaatactatagagtatattatagagtatattatagagtaatatatacgatagaatagtataaataggagaattagttgagaatattggtgatggagtttttttgttcgttggtgagtgtttctgggaagacgacgtcgaattcgagtatgagatcgccgcgttcgttcgggttcttagacagtggcattccctcccgggcaataaccttacgcgatttgtgcgaaacaacctcagtcacacgaatcgttaacctgcgattatccaacgtcgtcaacaccgcattaaaacccgttaacgcctactcatattattatatcattatacaattagtatacaattagtatataattggtatataattagtattggtatagagggaagagtactttgacgagaggaacggtgaatttgtatattaagttattgccgtcgcggacaaacctcatgtgtttcttcgtttttattatactacaaattcaatagaattaacaatttatcaactaaaattaacaatttagttaaataattgtaaaaaatagaaatttggaaataaatgcaaaagttgatcgggttacgggaaataaattttcttccctaatcaatcttgctgcttcaaccacttatttaccaaatttaattagtaaataattaaataaagtaaaggggttgcaaaaagtgtaaataatggggttaaataggggactgagtaaaaattacaagatgagatctccgggggtggccatgggtgattgttggtcgccttcacgggcaaaggttaatctcgtgccatctttccagccctaagattattgtgttaaggggtgagatactggtttgatgtcgattttaagagtgtgttcttccttatactgtttattaccattaaaccttttacgcgttactttcatcttcttcaccgtacctaatcagttttgtctattagtgtgtagataatagagattggattagagtgaggaaataattcacatattgctgcggtaaccacttatttaccaaaaaataattaacaaatgtaaataaatgtaaataggttgcaaattagtaaataatggggctgggtaacttaatagctaggtgggagtaaataactggtgccccgcagtgacaccgtaacggagtaccggtgtataattcttcgagtgtgaggggtaattcgagttcatagttggtggatttgaccgagggctgagtaacgtgaaacacgtcaccaaagccgcccatctcgtcaccgccaaacataaaggcacgatcattcccaaatatcttacgaaataactcactcggatccactccagtgtctaacacacattaaacccatgtaactagttaatttttaactgtgtaaattgaaagtttagggatagagggaggaaaatatcctcccatattgctgcttcaacaacacatttggtaaaaaataatagcaaaagtaaaataaataccaataggttgcaaattatagaattggtggggtaatggataattagggataactaggaaactaaatccgattgagcaagcaccgtaggggaaaacatacagacataagtgcgagagccgccgtgttcagggccgggagcagttcccttaagtccttcttcaccaaactggtcataaatcttcctcttctcaggatcagataacacatcgtacgcctccgatacattcttaaacatctcctcagcctaaatttattctcagcccaaattttatcaaccaatttgaataaatttgaataaatttgaataaatttgaatgaatcaatttgagggataattcggtgagttgttactttaactttggaatttggatcctgatgtttatcaggatgccattgcatggcaagttttctgtaagctttcttaagctcagcttcattacagcctcttttaacgcccaaaatcgagtagtagtcctaaacgtaaaatttaaccccaaaaacaaacttttcccatcctttaaaatatccgacacaactttacaaatatttaactcacaaatatttacaatttacaattatttacaatttacaattttttacaatttaaaatatttacaaatatttaaaaaatttacaaaaatttacaaaaattgagattataaattttctgaaatttgaagattatgctttagtaaaaactacttgcccaaggtacttgtcacttttacacaaaaataataacaagaattttaacacattaataaaataataagtttgattaattatttggaggtaaaatgatccaaggtgaagattttaggttcgagtggtatttctcttctgacggtatcgtcaatgataactttagtacttccaaatcgtactttactagcgctgtcgtctaacttcttcctcagtagtttataatcctccaaacccctgaaacgctccaaatcctccttattacgccataatctcaactaacaacacaattaacagtacataaatagttataaaatagtagaattagtgtgatccaggacggggattcgaacccgcgaccttagctacagtaccatagatacagtccactgtactgtggagtaaatatttaactatataaactatactttaaagtagtgtatgggtgacttttgagggtaagaggctttatagagcttagtgtatttgtatcctggttgtttttgtgcgaatttggccagtctgttccaattcttttcgaattccttttcatcttcaactgtgtaggcgacgagctcaaagtcttggctgaactcgccggattttattctccgtttccgctgtattctgccagcgataaggcccaggaatccgccactaaataacatcgtagcgttctgctgcctcaaagtcgcatacttgtaccagtccaacaaatcaaccagaatctccctcaaattctcaatcacgccaattctcattataacaattattttactttacattattaaatgattataattgaataattatgaattaaataattataattaaatgattataaaaaataatttaataatttttggaaaaaattaggtttgtgaaatcgttgattagttgtgtagagtttgtgtcatttttatattttttcggaatctcgagattcctcgcctaatcaaagtttaaacgcgattaatgaagttacgttgaatttgtatcgatttaagtcctggatgaacaaagtgcgtgagatacatttggcgcccatctcagtcttgtacggcaagtgcatacccaagtcccataactcaaatcctacaccaaataaccatcgatttcttaccgttgaagtgtagtaaagccgccagagcgattaattggaacttcccgctgttactcacactgtgaaatcccgtcaaactcgtatacacagaaccattcacaactataacagtcattcccagccagtagtaacaactatttataactggtcgaaaaataattacaaaaaagggattttggaaataaatgccaaagttgatcgggctacaatttaccgaggaaaataactcaataatctgctgcagtaactacacatttaccaaaaaataattgtaaattgtaaaataaataccaaaaggttgcaaaaatagaaataatggggatgtgtaaaagtggtaaacgtacatccaatttcgcctgcgattagttgtttatttttccaaacttcaactgatattaacttactcaactcccctttacccattttcacaccattcacattatccttactcatagtgttattgtcagtgatgtaagattgcaaattggtgtagaaatgaattagtgagaacacatgttgtatcggcggatataaccaattttcaccaaacttgtccactattcccttcatcacctaatcaaccgtattaccatttcttacttaactatatactactgttaactactgttatagtgtaaaatactgtaaaatactgtaaactactgtaaactactgtaaactacttaactacttaactacttaactactgtaaaatactgtaaaatattaagtatggtggggtatgtgtacctggtggaaatcttggttgatggtgatttgcagttgttctttgagtttgagcgcttttttgggtaatttaatgtctaggggtgcgaggcagcatctgaattgatgcatcttcggtagaataatcacacgttcaaatgccggaaacacaagcctgtaacctatcggaataaacccaaactccatcaacatcatcacaaaatccacatcaatacacggcgaccaacataactcatctaatcccaaataaccatacataattatccatactatgtataaatgggtatactagtgtgtaaatgtgtgtaaatgtgtatactattgttaaaatgtgtaatctcgtgacagatgataatatggttaagttggtacctgtgatgatattgagtgagtagagatagagaatggcgtcgagtgagttgaagggtagtaagagttgtaaggagttgacggggatttgtaattccttaattctctttagggttgagagtattttaatatcatttttcagctgattggtgattgattttgccggaaattcacaatttccagccagaattgtgtccaataatcctctagccaattttatcctaatttccctcagattcttactccaaactgggaatttattgagcaaattattttctcccgtgaccgggtggttaactttgtcattatggtaaaagagtaaaatttccctaaaaacttgaaattcaggcgattctttaattttatagcaaattttgcgatttgtagaatattttacactgtagcacagggtcagaaatgtctttagtcgttttaaacggtcattttcaaccacctcgaagtaggaaaaatggtccaaaacctctaaactaaactccggaaactcagattcatactcctcaaacacatccgacaactgcttaaaccggttaaaatagtcgaaaatacttaaacttccaaaggaatcccacgaatttaacaacttttcttcacgctctatctcttccaaaaatctgtcattattcattgtattttatctcctcattccacatacttttaccactccttttttttcaccaatttttaatttttttaaattttcttaattttatacaaatttaacttaattattcgaatttattatttataataatttatttattttataaaaattatttgaaaatgttgagttaaaattttactcaataattggtttccgggatgaagtatgtgaatgggttacaaatagcctcgagtatagtgaggggtgatttgtctgagttatgccctgaggttagaatcaaatgtaaaatagtcaaaactaaccccgtcaagaggcaaaagttatcgcaggagtctgttgacttacctcaggaacgtgagtatattctctttaaaccctttaatcatgacttggaactggcgaaattataccttaaagagtcgccaaactgcgttgaaatcttctcactcctcgattccaacaacttaatcgtcaaaaccaaagccatctcaatgctcctacacattctcaaccatttctcatttctaagcgataatttagtaagtactgagggactggaaacttctgtaaattctaactcgaaaacttctgcggaactgagtaaaaagaagttagtggcgagagtattaaaattgtttaaggagcggattgatgagatatttctgaatgacgacgtgatcataaattacagtttaaaattactcctggaatgtgttaagtgtgtggatcccagcggtttgacggagtttttgtcaaattttaactttttcgattacttaaccaaatgtcatattttctcgccagacaacaataatttcatcaaatctctcctcacacactattgcgtcatcaaaagtaattctcttacaaatctctctgttacagatcacactgtcactgattattctgttacatatgacagtgtcgacactgatgtgagagatgtttaccatgagaatggaaagttaaagttgtgtgtgatattattacttggcgttagaggcgttaatatattgaaaaaggacttgattttgattatcaaatcacacttaaaagttgagaaactgaccactcagcacacgattgtacgggcacttgtaaacatatttaacactttaattaagattgaaattaacgattcaattgataaattagtgggtaatattaataatataataataatcttgtataagcatttgagtagtgagtttagtgatgatacgagtgtggtgagtcccgaggacttggacgctttgttaagagacttactaaaattcacacataaaaacacaagtttatgcactaaattagtcttaaaatatgatttaaacatttttaaagctatttccaaacaactttacacattgagtccggagacatataagtcatatgtaaatgctatgaaatttgtgaatactgacgtcaaactcttggatactgtggaggaattttatgactttacacacgaagttccaacctgtttcactaaaattgttattaacaaattgcttacaaatttgaaaattgctaatccattaatcaaactattgattaaaattaattccttacccgatttcaacctactcctcaaactcataaacactcacactacagacggaaataacaatagtattatcgatagtaatagcagtgatggtaatggtgtgaatgtggatttgagtggtgtgttggaattgttatctcgatttgagggtgtaaaatcgatatttgatcccctgagattattcaaatattcatcaatttcagccaattacgacattgtaactgagttttttagctccggcgggactgataacactggcaactttgtggccactgatagaattaatttggacaagagtctaatgaagtgtatatataatttaagtttaaaggataatataatacttggcaaattacactacaaatccctcagtatactattacaacgttatatccagactctacacactgggaactacggcactgggaactacggcacagatgactacaccattgccgactacaacttacagttgttatcttatgttaaggcaattttaaataatttgatccagagtgattggactgagatttacattacaaacttaacagacacaaatttattcattattctgtaccacttactgctgacacataatctgcagctgatttaccctactgataccagtgacactgtaaatgtttactcttgtgttaaatgtgttttgggctgttattttaagggtgacttgtacttgctaatgttattaacgctgttgacgcagttgagactggggttacagagtgccagagtcacctgttcaaagtgtaattccaccagcacaaacctggtaaaatcaatttcagatgataaattacacgaaaaaccaaatgactgggaaaccgtactggaaacttatatcctcaaagtcttggcaaatgtactctcaattccatcacacactaccacacaattagctattgtgttatcacattataacatacaaattcaacccattccataccatttcaacagtaattctgttgatagggcagatagggttgataggggatataatgttacaaatgagcgtaaagttgaccaaatgtacaaatgtcaagataataacactgtagagaatgtggacactgtggagaatgtggaaaatgtggaaaatgtggaaaatgtggagtggaatatgttgaggggtcaaatgttaaattcattaattaatgatgccttggataaaaattcgcttgtaaagtgcgcaaaacagttcaataatacaagcacaaattattatatacaaacactaatctacacacatgaaattagcttatcctagtctcgatcctaaaatcatcgtccgaattccctcccacttctcccgagccttcttcattatcagagtcactagattctccaacatcagctcgagtatctttatcaagttggacagtgatggaggccacgaggttcccctcttcgtcaacgcacttacacataatctcgctagtatttatatactcgttagtaccttcatgtttaccggtagtgtatgtgtctagaataacaaggtgtttagtggtaaagtgtctggcgtatttagctaccttgaccaggtcaacagactcctcaccctcgtcagtttggattaaaacactcctgaagcagtctctaggctcaagtaagaacggcctagggcagtagaagccaattggactatttctaccatcaaccttgcaaatggaggtgggtttgttatttatctcctcactcctaaagtcaagcagttccctgcggaaaaagtcatttctaactccacagccataggtgtaggggtcagtagggaataatccaatactaaccacagctaaaaccttctcattcaagcttaaatacgagataacctcacgctccctagggttcctgtgaaacagagtccaaaagtattcaaaggacactgtttcagacgttaaaatcagtatagagtccctattatacttgaaaagatactccacagcacctcgaactggcgtcttctcaattgtcagtccatcgccaactatcaaatcactcaacttcaccttacgcacctaaaatttgataaacagctgaataataaaattgtgatatataaatttaatactaattcccctgtagaatataacttaatactcccagagtataacagcaaacctcgttatcgtctaatttttgcctgtaagcgtaatgttgcacgttgataggctcgaaaagagaagaatatttatgcttaaagtagtagaactcggtgtaattcttgggaacagtgactttgagagattcgccgggacgtaagtcacgtctgcaggcctggagactaatttttttcccaggctcatgcttttcgaaaatcttagtcaagtcacaggacagaacagacgctttaattattttaacctgagccttagtgtccttgttcttacccctgcactcgcaaaggaagtacacgtcaccgccgaaaccattttcaggcacgcggaataaatgaagcctttgtccagctccgtcgtacttgaagtcaggatcgtagtacgttttcccggaagagtcacggaagcaaaactcgtcattgaaagtctcaccagcggcacagtaaataccaattaccatcccaggcttcggttcaatttcacagaaggcgcgggtttgcaaaaaagtaccctctagcttatctggaccattttcaggactcaagttattaaacaacggatgattcccactaccgcaaccataacttattggcaacacatcggtaaatttaacctcgatccaacggtacagtaaatccttcttctcttcagtgtttaattcgtcagatttgttctcaccactggtatcataattgggatcatagacgcaggcgaagttgaggctgaagttggggtcactggagacaataacagcgtccgcagggtactggatcaggtacccaccgcccagaaactcagataatgagtaaatcaaagtcgagtcactacggaaaaggccaaagttatttatcacacgcttaatgctatgggtaattccgctctttgacatgggagccaacgaggttttctttaaatcctcagggtacattttaatcttacgaccctcctcagtctcattattgccacagtagaacttaattgcgcctcccttctctaaagtgtaactcttgaaactctcaccctcagcggtgaagtcacccggctccttaaatgaaagcgtttcattcaaaactgcgtagtttattgccaaattcactgcattgttcaccttgttcgcaaagtacttaaatccatacttagcatgacaaaaagtacaagaataaattataaaatatataaacaaccttgacttatacatcgccattctcaacaattatcattaattttattcaataaatcaacagttttattcagtaaataaacaattttgttcaataaatcattaattttattcagtaaatcattaattttaatcaacaaatcaacagttttattgagtaaatcactagttttattaagtaagccagtaatttagagtagtagatagtggaataatagtatcaagtataaaatagcgtagtttagggaaataaatgaataatgttacaaggtgtgtaagaacggttaactgaaaaaggactcaaaagtgagcttaaatgtgtaaaatttgagtctttcaattattaaaccaggaatttcatgcgatttttgaaaatttaaggtatattctgaaaaattatgaatgatgggacaatctcactataaagcacaattcatagagcttttcagaataaatttaagttttaaaataatttttatcgcagttttgtgaaatatgtccggattggagacgattaagctgctccaatatggaaagtgttatgacgtatttttggctgaggattccatagggaaccggttcgcagtcaagaggttttacaggcacgagttggagaaacggaaagaatacgtcaataggaatgggaaactggtgaaaaagaactggtttgaggactttaaaagggctttagaggtccaaaaagtcctggatcacgagtcctgcatcaaattacatggcgttttcgggattgatttcagtcgagaaaggccaactttcgaggaggaaattgaacttggtaatctctttatatgttaactatggtttagtatttgaatatgctgaatttggctgtctaatggaccttgaaagtttccatgaagaggtcccaaatttccccaaaccagtcgtcaaatgcatagcaaaagaccttttaagcgctcttttataccgtaatttcttatgtaaatattaatttgattatagtgtcggagataaacgtcgcacaccgtgatttaaaacctaataatatattcatgaattcacgaggcagatgtaaactaggtactctacacactaaataaattagttaactgaggtgttaacagtgctgcaggagactttggggaatctgaatttatgactgacggaaaggtcaaaggctccaaaggcacttattactttctagcccccgaagttttcgatgacaattccagtatcaattccagttactcatacccatactaataatactatactaataattatactaataatactatagtagtaatagtggtgacagttaatagtggtgaatagtggataaaagtgttataggtgggaatgatgggagtgcgttggatatgtgggcgttgggaattacgttatggattttatattttaggagtttccccttttactgtctctctgggtcaatttacgaaacaatgaccaatatcgaaaactttgacttcaacactcaaatacaaactgtaaaattacttaattcacccgaaaacgaaggtaattccggtgataaattatgcaattccgataaattatgcaattccgataaattatgtaattccgatgataaactatgtaattccgatgatggaatggatgaaaatgagtgtaattccgtggatcagtctgttaaagctggagaagatttggggagtaattctcccgaaaactgggtgaaagaagatgcgcgggagtttataaatttgttggagaagatgttggagaaggacccggaaaaaagaattaaagcaagagaagctttagtatggaataattaactaaaattaccaaatttgaataaaaaatgttatagaatcatgaatggttgagaaatgtggattatgaggccgccagagaatattgtagaagaaatattaaaaattaattttttaattttatgtaattatattaattaatggaggaggagaagagtaggcaccggaagtaccgcagggataagccctgggacgatgataccatagatcactggaaaatcgaaccttttaccaaggtattttccctagtaaaatttaatataatttattataaaatgctgatttaggaggagaatgagccttctctcgtagaggagagttcatttcgcatactatttccaaaatacagagaaaaatatatacaatccgtttggggcgacgttaaaaagtattttattcactctatcacgtttatttctttagttgtttatcgcaatatcacataaactgtgagctggatttgctggaagggtcgatgactgtaataactactgataaaacctgggatccttacataataattaaagtaacaatcaactaaatcatcattattaggccagagatttgattaaattattggcgaggagtgttccttttcctcaggctaagaggatacttgacgacggcgtttactgtgacattattaaaatcggtactaaaaatatattaacacatgttcaggagggttaattaggaataaagataaatttattaagaggagacaaagactcgttggaccaggcggttcaacccttaaagcgctggaattactcacagaatgctatatactaactcaaggtcaaacagtatcagttatcgggtcaatcaagggtattaaaactgttcgtaaaattgtcgaggattgcatttacaatatccaccccgtctactatatcaaggaattgatcattaaaagagaactaagcaaaaatgaaaaattaaaaaatgtatcctcccacagttaataatagttaataatagttaataatagttaataatagttaataatagttaataatagttaataatagttaataatagttaatagtatagttagtggtataatagtgtgtaggagaactgggacagatttttaccgcagtttaagaagcgttgtgtgaagaggaggaaggttaaggttgtgaggaagaagaaagagaattcattacttataccagagcaggtgagaatacataattgtaatagctctttagcaaccgaggaaggaggatattttactggagactggcgagtattttatgcgtgaggaggagcggaagaagaagaaacaatttgaacaacggcaaaagcaaaaacaaaaacaccaagaaaaaaaattaaaaaaattacaaatttatgaaaaaaatgattcaaacaatgccaatgaggacggttctacaagtgaacctaaaagtaaccagagtgaaaaatcggataaaaaattaactagtaaaaaaagtacgaaaccagcctcaaaagattatttcatataataatgtactaactttatcgtgccaaatatacaatttagtttactcagctacttctgaaaattaaatattaatgtgtaaaatgttaaaagggaattacgaagaagtaattccccatagggagatttgattagttaatatcgtaaattaatatcccctctactttgttacaaatttcacaaggaaataaataaaatttatatcatataaattagaaaatttaaggagaatggatgctattgtgttgtatttattactttttatagaatagcacgtaatctctaaatatgggatctgactagtattttccgaatttaatgtttacggataaatgagtaaaaagtacgcaaagtctactctgggtgcagtggccgcaagaaacaccaaggcggccaatgtagccaaaagagaagtcgcagattttaaaaataacgttaaaaatgttttaacacaggtttgaaaatgtatttccacgttaaaattttatttttagggttataataatgatgaattgtcaaatattcaaagaaaaaaaatgtatttctctacccagttacacatttcacttttatccctaaattataatttttattaccaaattataacttttattactaagttaaacgatttattaccaagataaatgatttactactaagataaacgatttaatattgagttgtgtaaattttctgtagtttaaatgacattgaaaagttgcaaaatgactcctcaaatgttttatcatcgctatacgaatattccgaagagttacgattaaaaaatgtaccacatcctatacagaattatgcctagttacacatagatacagagttacgaataattacgcatagtataactggttaatgtgtaacaggagtcctatgtgttatatgatagtttattggacgactttaagcagaacatgggtaaaatcgaagatttgagagcgaaattggtaaattaccaaacctcgataccaaattcaatacgagacgtgaaacacgacatgtaagatttaaacttttaatagtttttagacatgtcgacgaagatgagaacatggaattagtgcaagatcaattatataacctgtaagctacagttttcacactgttgttcagttctgagtacccacttgaaaatacaattttggacgaaagatccgaacaaattaaacaactaagatcatctgtttacggtaatcttactaattaattatactaatcatactaattattactaattatactaatatttatactattaacagtataaataataatgtaatagggattcaagatatgtatattgagattggtgatatggtggattatcagggggatcaactaggtactaatatttcagctgaatgattttcagataatattgagagtaatttgttaaatgttgtatcagactccagaacagcaactaatgacctaagatcaattgatcgaagagcaatacccaaaatgacttatttcgttgtattcgtactcttggtctgtgttctgattgtcattgtaatttactctaaaatttgattaactctacactaatttagtagtttacacactaattttagtagagtttacacactaattttagtagagtttacacactaattttagtacagagtttacacactatgcatatagtatagaattattatacattaactctaggagtaagtagttatagtgtggagttaacaggacagaacaacttttaggtgagctttaggtttcctaataacgtcacatcgccctttagctctgaagaaaggtttcttaacaactccgcctggagtagcagaaagctccctgaacctgaattttaaaggctcctcagagttttcatagagccgtttagcgttgaaaagagcggatttaatggctttaaaaatggcaacggcgtatttatttgagccacgctgagcaagatcaccaagtgccaggagcacaggcatcttcttaatttgccttaaaatcttcgttaactttatgggcgagagaaacaaatacttaacatggcaagaagcagttctctcaagcatgagcttgtccatcctgccacctttgtgccgttttctcactttaatcccaagctccttagccttcaaagcgtcgagatacgatctttgcttctgtttaatcgtgttctccatcatccgaacctcaggactatcagcagaatatttacgaattggcaagtcgcaatttatcttatgaatctaatgaatgttattaaggtgagaattgtgagttaattattttttaccttttccatcttttgagaaacggttaacctgtgagaaggatacaaggcaaagttgggagaatttgagtaattaagcttctgcgatgaaattaagaaacattctgaaaaaccaacagaaaatagtaacaaaaatattagcatcaactacattttaatattacaaatatgcataaaaataattataaaataagaaataataaaatatttttataagaatttgaaattagtaaaatataataaagatgattaaaaattataaaattccaatccatgaagaatgaatgtgtaaggatggggaatctgaagaatttgcgtttgaaatcaaacgatgaaatttctggaataaaaatgtagaatatgaatttatcttcgactcaatgatttcaatttgacttttggactgtactatagtaacatttcgagaattagttttttcggcatcttctttgaactattttagaaaaaatgaaatcgcaaagtaaaaatggcttcaattaacctaatgaagttcttggtctcaatttcgactattttagtcttacacattggaggggtttcgtgcgattcagacaccgtaaacctctcgggagtcagtgaaaaactcgcctcattggtttcagttaccgtgtttatcctggtatcttcctgtttttttcactttttaacctctaagataaatgacaagattccaatatccctggtcctatttatctacgggatgctcacctacggcattctgatgagttttgatcaccaaaaactcccctttgggattctcaggtggatatcatcactaaggaacattgataactccatactctactttatagctcttcccattctactctatgaagccactcaaactatagactggtattcattttgtaacttcttactcgcaggaatcagtctcgcagtcatcggggtataacacgcagattcagttattttagtcacataattgcttattatactgataaacagctgtttaaccatgtaattatttgattgaatatggttcaggttgtattgcaagtggcaatactgggaattctgttccattacacactaagagaaaatgacagatggtcattttttattagtttcctactggcttcaattttaagttctacggacccagttgcagttttatccattctaggtgattccacttcatcacacaaactaatcacaatgttcaacggtatcaactatttacatcttaataaaatattttaccgaatttctgtaggagaatcactgataaatgatggaacgagtgtgttgttatttcaatttttttatttattgagcataaatgaaaagtcgtcgtattggtactacattatgttatttataaagctgttgattttatcgcctctacttgggatcgcctgcgccctggtggtgatagtctggatatcatttttccgtaaatgccacatcgtccagtgcattatctcaatttcattcggataccttctgtacttttgctcagaatattatcttaacatttctggacctctgtgcatagtttgctacggcatattcattaaggcatatgggctaattacctttgataaagaagcacttgagaaacatcatgtactaatagagtcgatctcatacatgtcaaactgtgtagtattcgtagtctcaggtattattacagtagggatgctgaggtcacagtttaaaatcaagagtataggtaactccataccctaatctgattattttaggcatgaaaatacttagacttgttgttgtgtatatttatctcaatatcaccagaactattatgctcatactctttaaaccactactgacctacaccggatatcaaattaatttcaaagaggtatctcaacaccattatactatttttatactattaatatactattattagttattatagtattattatactattattagttattatggtaatattatactattattagttgttattgttgatttggggaggattgagaggtgcaatggtattagtgctaggattgagactggagaatgataaacgaattagtgatttaatcagcgatttattatcattttacatttcaggaagcaccatgatcattctaattctacacgtaccaaatacacagatacgtactattaagtatatataatagtataatagtgtgtattggtttgtagggatttacgtttaatttgttgtataaattactgaatccatacccggtgaaagagtatcgaatagagtatttgaaaaagacaatgaagtttattgaggataagtatttggagagattaagcaatttggagaattactggctatacaagaatacagacgtgctggaaaaggcaaatctcttggttccagtactgacaaatgtaaaatggagtaaacttggaactatttcatacaatgtaacacatgcgaatataaaaaatctcatggtaattgatgagaggaaaggagcaactcaggaagagttagaccttgaagatgaagagaatatcttcctactgaacagacaacttaacaccaattttacgcacgattatttgaataatataaactcacagtcaagtgatttatacactaacccgtctcatggtaattttaaatttatcttagatttatgaattaggaagttccggagcatcatcggcaactggagttgacggcccaatccctccaaaccgcagcagtgagaacctggaagtcatacgctacactgttagcagttttagcagtgattatgaaattgcaaagagaggctccattgcaataaatgaaccactaccgaaggaggaatattcagaaatggatagtagcagcagtaaagaacttgacgatcaggaggtttacattatcatcttcaatggattattatacgtaggtttacagctaatgtggaattctgtagatatataatgagatgtataataacagccaaattgacggcaagtccctactaactctcaagacaatcattaacatttccctggatttctcaatcaataaactcaaacaaagatcattacacgtaattattctatcccacacaccaaatattaatcatcaattacccattaacacattaacttacttacctacttaatcactcactcacttactcacttaattacttacttactcactcacttactaagtaattcagtaactaacaaggtaacaatgaattagatatggaataatgtgaagagtactaagataagcaagttgtatagtatgataaattatgacaattttaatgataacgggacggaccaggacagtccaatgaacataggcgactttgaggatgttaataagattaacgggtttgagtttgagtggatgctactgaaaaacaatctcgagtatattttaagtaaaaggttgaacttcatcaatataaacaacgcctcctttgtactggatatcatactctcgtacatacaggcgcatgaaaagctggtagtgaagcagaacaatatcatacaaattattctgagcagtaaattcctgtatcacttacacattaaatagttaatttactaatggactttagggagagttatatgaagcagatcaataacgcgaaaaaatacgtattcataataaagaacaagatgaacgtaatgttttactactgtttactgattaaaacgtcgtcgacaatgataaacataaagaaagagattgtgaagcagtattattcaaatgggatgctactggacgaggacgagaaaaagctcaacgacttgttggacgagtacaagatcacgaacaaatcaaactacaccaagatcattaaatttataattaagaaattttaccacatgataacgttcaagaaaaacatctacgcaacaactaatattgtataataacaaattccaggttatggaatctccccatacctagccttatttattatctatatttaattttttactcaatatgatagattatcagcatagagttggacacaaaacaggtagtggcgctccggcgagcgcccatgacgtcgcagctcaccagagggagcgattgcgtaaattggcccttgaaaccttcgatttaaacaaggatccatacttttctaagaaccacatgggtcacgtagaatgcagattatgtcttacagtccatacaactgaaagttcatacctaagtcacacacagggccgaaaacatcaaatgaatttagcaagaagagcagctaaagaacaaaaagacgcctttatgaccatcgcacccatttcaaaggtttctcactagtttttactcatactactaataattaactacttcctaaacttattaattgatttaatttattaatttagactagagcttttaaggcacctacattaaagatcggaagaccaggttatagaataactaagatgagagaccctgaaactaaacagccagcattattgtttgaaatagagttcccagaaattcagggcacaccaaagtatcgatttatgtcagctttcgagcagaaaatagaaattccaccggatccaaattatcagttcttattattcgcagccgatccatacgaaacaataggtaatatagatattagtaatttgatttgtagcgtttaaggtacctaatctcgagattgataacggccctaataagttattcagttactttgacgataagaggaaactgttcatatttcaagtacattttaaggtaaagtttaaatcaatcacaaaatatttagcttaaaaaaacatttaaagttttacccggactaccacaaagaccaactaaatttgatcacgtcggaccaggtccccagttttaatctaatagacttttccattacttgattacgttttacattaagttttcaatgttagtatttaattaactaaagtaaattatatactatctaattatggtatccaaaaatgacatagaattgcaaatgcaaaggtggaataaatctatagtagttaaacaataatttaaactattctaattagggtaatttaagtagtaaaggtatctgttaccggattacgatacacatgcatgaaacatgtacgaatataaatctgtgacttgtgagataaatgttagactaaagttgtgacagattcatggagatgaattttaatttaaaattcgattatttgtaatgaaaatattttggtttccagaatatttctcgttatggatagtcattaccttggtgtgtggtgctccaaatgacatagaatctaacggtacacaggattctcgacctgaagtcagtaatcatgaggaaaacacatctgttagtcaggaccaaatcctccaagaaccagaaataagtcccggatctgttccctcaaaactcgtaacagtcgaccttgatataactaaaagtaccgatgatttcgaatttatcagaacgggttattattctacgtacacgcccaaattcaataatctattcaataaaatagtaatgagtgtgcctttcgcctccccggtggttatttgggaagccaacgatgttaaagagtacgcaaacgaagtttattgtattcgtattggcgggctagcacttttatatttcttgacagtgcacatgatcaacggtgatacaaagtggtttaagaaaaatattttcggtactggatggaaaatcgggacaattccatttgaaattgaactttacacagatgacggtgatggaaacaaagtggagatggatccaagttcttataatattaatcaatcattaggggttaaattatactattattactcatttgggccagattcaaagtgttcagagttaaaacacaaagggtttacagtttggaagcaccaaggtaatgggccctatcccaagtccattttatacatgaacacacgtttacttagtatctcacttaccaattttaaaacggcaatcacatataaaatttggttcactgatgattcctgcgtcagatatattttagaaaataatgcttggaaacaaatagaatgtgaacaacaatctgcaagtccaagtgtgcaggaagctttagtttcggataaattagtttcactagatattgaatcaaatgaggaaactgattcttttcaatacgagttttgttatttttgtgattcccgttatgggaggtttaggatatatacatcaaaaaagggatttaaattcagttccgttaaggaacacgattctgttatctgggataattctgaagatccatcagaattatctaatatggtagttacccagtctgttggaagggacaaattgacatcaaaacaagtaattgttcatactaataaagacaacaagcttttttacagagaaaatgaaggggatttatggagtcacggaaactgcatatttgtaaccaatgttcctggatttaaagttttaacattaaatgatgatggatcaaccagccaaaacaattataacaactatcttattcaaaaacagaatgttttaattaattacatattcaaacctagcgtaaagtgcgttgaaatcaagtttgatgatgacaccgtctggaagtacagtgagagcgagcatggacataattttccgacaaaaatttccgtaaataatgagaccaagggtgtgcggatctttataaataatataatgtacatttacaacttacaaaacggtgaatggaagttagtattcgaaggtcctgttaaaagatctataacttatccaagatcttatgaagcgagtacatttggtctttgtttggctgatgatttaaccagattattatttcctcattcacaatcttttggttaatgcctttaggttatttgatttaagctcaacaaagatctctaaacttaattttctgtttattttaaatactcaatattcaacatcaataccatcttaaaatttaaataaaatatcctgtatttcgtaatagctaataaaaaaactcacgtagttaacttcaaattacttacttcaaatggtatttaattaattttcccattaagttactactattgaactacatctgttgatttcaaataaacaattaccacttataaataggctgaaatgtgaattaaataaaacattctaaaccaacaaagcccattacatcgaatagtggaaacagttgttcgaataattttaagctgaataataggtatagtaaaatattttacattaatttcgctttaaggtaattaaaaaagttctcgtaaaatttattcttgttgaaaaatagcttatggagtttgtttggtagtttagtccaagttagatcaacctcgtcattcaagagcttgtcaaccaaagcctcatcaaagtcctttaacaggcaatatgaatttttgtgtaaattaacaagcatcactgaattctttccagtgcccagttccgacttgtatttggggtcaacctttacaaattgcaaatctctgttggacagtaataggtttggtttttcttctttcttgggctttactgttccatcaggttcaacctcctccacttccaccttcaaatcttcttcagcctcttcgggttcagagttcctcaccacttcgttgtacatttcataattcctgtacatcttgtgtaaatccaacctatcatttgtcgtgaaaacacatagtcgctcctttatgttatatttactgcatatcacgttcaaatcagagtccatttcaaacatattcaactaaaaaatgattcattcaagtgataaaagttattgtattaaatggttataaacttacagtaaatagtgtgtagaataacttttccagtttagtcaagttactcgtattgttgttcaacatgtacttcagctcgttattgacgtaaaatcctacaaaaagtgtattcttcgattcagttagtttttgttttgcgtctgtgttcataacttcttcagccacctcctccttcacgtcgctactcgtgtaaaacatgccaagcactttgttgaacctcatgcagaagtatttcaaattcaatggaacatctgcgtcacttccaccccttttattatataacaggactttattcttcttatttacatttttaaattctttgtagcttttcacgtgtttgcaggtgaatgggtaattttttacaaagtaaccgctcaatacgttcaagttatttaacacatcatttggaaacaactgtaacaattatcaatcatcaaaattaaatatttatgttttattttatataattataaacctacatcgtatttattattgtgtagcattagtaaagctggatggattttggggttaacatttagttttttcaaaagtttgcgttccaaaaacaagttaattcttccgaatttagcgaatttttgatattttgtagcgaattcatcccaaagtgatgaaaaagccttgcaacgagcgttatcgtctgagtatatttgcactacccagacgttgggtccaacaagctcttggtagtctgcaagagtcaagttaactgtttttgagggtatcacatcaactgtatatccgcttgttttgtcatatatttcacgcagatatggattcactaaaaaattattaatttgttaaaaattagctttaggacaataactaagtaacaatacatataatcttgtatgcttctttaatttttaaaaaacgtttttcacattcaacgcagtctttattcttatcaggatgcctaaaaagtcttatttaatgaaatggaggtaccattttaatgacaattcacgatatttagccttgatctcagagtccttggcgtctcttggcacctcgaggatttcgtaaatattctcgtccattttcttgaaattactgtaggaatcgtgcacatcttcgtaatatttaaggacaaatgccactaaaatattcattaaaagttatttcaggtctatatattccttacacaataggacgaggatcaatgtggttacaataaggtttgatctgaagaaagaataaaccttccagaacggggaattcgtcttggatggcttacttctgttatgctaaacaaatatgttgaaaaattaagttaccgatgatttcacagagtgtttgttttttctcctaaaaaattaattattgaggaaacaaattacttactttggacttgtctccatttttcaaccaagattcttaataattaaattcaaaaatgtcaatgttgaggtatttgggccataaatttattaatttgtttgtgattacaggctttatgaggtggactgtcacccccggttcaggtgtaattatgaatattttattactttaatgaaatcggttatattggcaggcggccatggaacacgaatacgtccattaaccctttcagttcccaaacctcttgttgaattctgtaattgtccggttatagaacatcaaatcaaggcctgcaaaaatgtattacacattatttagaactcaaatttgtatatttcttataatttattttaggctggtttcgaccatattataatagccgttaccgagtatcataacataatagaaccgattaaacaattggctgaaaaagtaatttacttatttatttttaatctttactattaattccaattttatttattatttcgacatataaatatttcttagtatgccatacgtatcgatttttcagtagaatccactcctctgggcacaggtactttttaatatcatatttatttatctttttaataataaatctgatatttatctaatttttctatagctggcccattgagattggctaaagagttgatttgcagtgacgacgacagtgatgattttgtcgtatttaacagtgatataatttgcaattaccctctgaaggagctgttggaatcgcataggaaaaactcggccaaagttacaattctggtacgactaattgaattccagtgtttaaactttttcaggttactacggtggaaaatagcagtgagtttggcgtgatattacacgacgaaaatggtctgataaaatcttttctggagaagccaaaaaactcaacatcaaacacaattaacgcaggtatgaaaaaataaagtttatgatcatttcaggcgtttatgtactaaataaagaagttctggaccatatacctctgaaaaactattccatagagaaacagtttttcccaaaatatctcaaatataattcaagctatatatataaattagatggattttggtaagtttaaaaaatcttaatatattctggtgtatagcatataattcaattttaggtcagatatcggcaaaccgacaggatatttaaatggacagcacctatatctatcacacgtccaacaatcggaatcaaaagctaataaaatggaaaataatcaaaaggaaaatgaagttagtccagtgcagagtcccatgaatagtttcgaaacaacatcaagttatcaatcaagtgaaactaagttaaagcagcctgttctaattgtatctatcattcataaattaattgtttttacatcccttaaataatctttttagcatccaacttgtgttatcgggaacggctgtatgataggtcccaacgtatgcataggtcctaatgtcgtcatcggcgacggttgtagaatattaaattccactttattcaggggtaaacaatagattaatcacatattaactagttaatttattagaaaacaacacaattatttttagaggtaaaggtggaatcttactgttatattgaggatagtattataggatggaaatcactgatcaagcagtgggtaagcacacattaacatttatcctagactaaaaaagaccttcactcattattttttagtgtagaattgaagggttgagtgtttttggtgaaaacgtcatagttgacgaatccttgtacataagagggtccatagtcctaccacataaaacaataaactcatcagtatacgaggacggacggataataatataaattaaataatttattatgttttgtattatttactatgttatttttgtctacgttagtctgtcaattaccataaagaatatcggtccgagattccactactctctcgggattaatcgcacaaatttatcaaatttaagaatacaaaatgtaaatttatgaatttaaaaatcctttataggaaatagtaatttttaataagaatccgcctcccaattgtaaactagaagttttcggtaaaaataataatatctggataataacttggaccggtcttccaggaacaatatacgcaggagaagaatacaaaatcaaggttatactcccaaacggataccccctaaaaccaccaattatttatttccttcaaccaagtaagattcaacacactacactagatatcattccttttagctcctgtacacaaacacgtctattcaaatggagatatttgtttgaatagtatcggacatgactacatcccgtcagcttctatttccagcttcatactctcaataatctctatgctttcatctgccaaggaaaagtcattaccaatcgacaatcacctgcgtaaccaccatattctatacattgacaactctagatattagaattttaaactctctaagtccattaaataatacctctgatacttgagactgattattatttcagatgtggatttgccacctggtacctcggaaggtggatttttatatcacgacgacaaatgttaaataaaatgtctaattttttactaattttacttctttttactctaaaaacttcagattcataccatattaatctacataacgtacagacaataccgaatttagaacttcttggatccagctatagtatccacaacaacaatgctaacaatgataaaaatgtaaaaaacagccataataatttaaaaagtgaaggaataggtgaaaaggatgtacacactggagagggcaaacacaacgtaattgaggtgactaacctgaaaaactcagtaattgatattaaaatgatgaacaaattaaacaacaccttagaatatgtacattcagacaacgtttacatacaaaattacccaaaatgtgaaatgttgaatgagaacaaactcaaggacgaaaaagaagaaaaaagtgaaattttcactaaaaagtcaatggaagatagcaacacaatcaatacaaaaatcatttcctgtgccaaattcatcattggactaaataacatgtaaccaacttaatctacacattttacttcagaaaccgcttcaacaaccatttcatatcagatttgaggaaactaagaaataacttaatttcctgcggtaaaactaaaaacaccaggaatctgatgaaagaatgtgtaattaaagaatataaaaagttcttcgaattatacggcacacactatatcataaaaatagttttaggttagattttctttaatttagttttataggtggcaaaatcgtcattgatgagaacgttagcagtgattctagttcagaatccaaaaatttagacttaaacttgggagtaattagataccttgacaaaggctccggctccaacaactcaaacttgaataacaataatataagcattttcggaggcacagtttgggacggtaactggtacaatgagcttaaaaccgaccctgttcccctgaaattcaccctggccacttataatgagatatttaaaaagtacaacattagctacaaacattacattaacactctcaaaaagcacctttaattgtgttaaaagtagtacatgtatgaatttgataacgtcaagtacctcacccatttatacgatttgttattattattaacgttcaagtactttatctaaatttgccaattaactaacttgttcgactcaccttcaggtttgtgatattatacagaggaacctcgaatacaaggttaattggaccaaattgcttcatgttaactttagtgctaaatgcaatttcagaattcagaacaacttcacttgaaccctataaaccagtttaaaccttatttcctacttgtatattctttacgttccaggatatcgagttattctccaacttgtattctgacacctataaaatattacagaagtcaaaataaaacacaaaatatgtttaaatcattataaatagtgacttgttgaaaaaacttggggttcagtgacatgttgatggtattgacatggtttggcagtttacactttagaagaaataacgaatgaacatttagaggcaagttgcaagagactcttattgacaaatgcacgttattttcactattattcacaagttgagtttttatatcaaacggtaaattaatattttttaacttgtaatttaggatagtgtattcgccctctttaggtataaatttcatgacgttattaaccatttcaacatcactatcaagattataatcttcgattactagtttgctttcaaatctatcatcgatttctaaactttgaagcctatgcaactgttctccatggtcttcaaaagtaccaactctatcaataccaccagtgataaagctactatgtgtgaactgattattataagatggaagttgctctaaatgttgactactggaaggaggattgctcaaatctgactcattacttgttctagacgtgttatttaaaaattgtatattgtttgaaatgtacagttgtatgctcggtgatccttttaaatatgacttgatttgtatttgtccttccactgttgttttcacatcactgcccagtttcgcattaactttctcaatcacatccacgaaaatttcattcttgttatttgggtttattagtgatttattactaactacagatggtagcatgttacggttactggtcatcggctttatctaaaaaggattaaaatcactttaaactttacgttatctgtcgtcaccgttgaggtgttatatatcttctgcttcagctggtttatacttatacattgtatatatccgtaatcgagtatctcgtcaagtatctcatacgccaatacaaagttcgattttatggtttcttcgttcaatattccgataaaatcctaaatatcacgttgtttgctatatatcgccttagtcttacctttaaataattagtaattttgtttaacaattccatgacatacgacggtgacgttatatacctcgtagtcatcacaaagtacaaatttgacctcctaatatagaaatataacattccttccagttcaaaaattgggccgacattactattttcctttaaataagtgtaaaaactctcgacatctgaggcaacaattatgttttaaccgggaactcacttttagtagtctcattacgtaaatttctcgacaaaaggacatctcctgagtgagaaatgataaaaaattgcgatatagtcattttttatgtaataaaaacacacatgtgtggtgtttagaagcttcacacattaacacttttaatttttatacagtttaagtattctaacattcttttacaattaaaattaaaaaattttaaactcaacatcattttcaaatttggaagttgttttttagtttttattcatactttcataaacagaaattatataatttttactttaatttatcttttattataattacgttttatttatttatttttatctatgtaaatacacatttatgaatgacagattaattcatggattccaagtacttcttggttgaactcgccaattctccagtttcacaatttaaattactataaaacctataaaatcgtgcaaaatataattataaataatatgtgtgaaaatacccgtggcaagtacccagaagtacttaacacatcaatctgattttatagattagatcacagtaagtaaattatatacaaaatgacaaatgttactatagatgagcctaaaaaattaaaaaaccgtaccgagagtacggaaacactggatggaatgccagagcctgaaggggagagcgaatctcgagcttgttgtaatattacgagcagacatgtaaagatcatcatagccgttttattgctattattcggccttttgttaataatagtgacctcgtacgaaattttaagttacaaggaagaagcgaggaaaagagaaacagtaagtttgagaaaatctaatttatttttagagaaatttggtgagtgaggagctgaacaaactagatgttgaggataaaatgaccctcaataaaattattaccagccacttggaggatttgattgaagaatcaggaaccgataaaacacagaaagatatctcagaaattccagaagacagagaattaaaaaaagaggagatacctgcacactatgaaagaaatgttgattcgttcaccttaaacatagctccttacaagagtttcaatgagttggagtacaagaaggtctcttacaattgctatagaaaggatttcttcaggaccaacattaacggcacgggtaccaatatgagattcatagcgaagagttccaaaattccaaaaggctcgagtgagaatagcggtgggtgtgcaacgagctattactggatttactacacaccagcaactcaaacgactaaaatttattcaatgggaccatactatggacaccatgaagtgaagatgatagagaatatgttcaccccaatggacaaagaaggttgtttaactctcaatggttgtgtacctccaattgataacgtaagaaaagattacgactgggatgaggaatataggtttataagaagaatggcatacataaccgcagactcctcaaagttccaggatattgttgagttccaaaaattccttgataaaaaaatcaaagatgaagtcgagtcgtacgatgaaaaaattaggattctaagtcacgaccgtgaatcagttcaacactacagtacacttaaagaggcgacacactgcgtttattcaatttaatttacattttttataatttcagaaccaatcaagcattcaataatatatttaatgtgtatatttattattaggtttgcacacataaacgtgaaaatttttgaaagagatttatgtttgcatggaaataaattggtaaatatcctaattcaccctataattgatttattttactctcatccaacagccaattacgattgtgtgtggggtggaatcttttaactgtctcagcatagagttggttcagacctttaattatgccgatctagtgatatagtttagagtctcaaaatccataacaacccttgtccagtatataagccagtttatatacaaaacaattcatcaaccgttatcgcttgatgctacattgactagtttttcgaattcatttgtaacattctagtgatacaacgaaaatataacgatggtggaagattcggaacaaactggagacaagtcattattggatatgaagatgaaggaatttgagaacgctaaaactttactgatatcctccaaaaggccaaaggctttcctaataagaacagcctgcgagttgttggccggcggcacagaagtgttaatacttagtgcattaggggatgctatgggtttgtgtctccaactccagatgttgcttgtgtcaaagaatgcggctacaaccttcagaatcgagacactgttgaacaagtgtacaagtgagaaaagcaagaaccccttctacatcccaggattactcgtttttatgaggaaacaccctgaattcaagggttcgaggatatcaccaggatatatagtcttctcgccgagaacgtcaacattcacacctttatatgaccctgaaccagctgaatttgtattatcggtaaacgcaggaaatcctgagttgacagttggtggctcgggagttaacggtgcatttgccacgctcttgggtgagctcggacatgatctagggtcctacacatcactgttcaaaagacttgctgaagaagccagaaaaaataataagtctgacgaaagtcaacacgtagcatatgagcacgaacccaactcacaggtcttgtttgctatgtgccgtttgccaaatgacccatcttattttaagcttcctaacgagggactagtatttgtaaccctgtttaacaacaaatacccatttactaatgtaagttaattatatatttttaaacattgttataaataaatttaggatcacaatttgggttttgtatatgttgttggccccaacggggccaactatgatgttgacggcttcttggagtccgtccataagttgggggacaatttggttactgcactttgcgattataatggaatggctaaacgagaaactgcaaaaaaattacctagagtaacactgtgtcgtttgtgcctagttagcggcggtgtatacaaacataaagatgttacaaaactagatgttgccaaatcattattaaatgtaagtcgactatatacaacattcggcatttatactcagcttacacctgtgataattatttcagggcatagcagagggatataggcatggtcctacaccaagattcaacttcgcatatgacgaggatgtatttcgtatagtaagtcttcccaagtacccagttaattatctttaacttaggcgtggtgtgagacaacggggttaaaggcgactttgccggaataaaggatgatatagatttaaaaaatgtgttaaatagataatgtattttatttatttatattttcatctttcgttactttttccctccttctatttttcatgtttacatttgtttattaatttcaaattaatggataaattggtaatttttagtattcaattttatttatagacgtttttacacaagttggagaagtatttcttcagctatgaccacgagattatttttttcactgaagtggagctcctgagatcccaatgcagaaatgctctacaaggtcaaaacacatttcagtcattttaacttagaaatgataaattttagtgaagatgataagaaaaggtactggatcgtaattgttaggggaatgcttaacatttgtaacaattattataagccacacaacagggacctagaaatagaagtaaatggcaaaaaaatcttacttgaccacaaatacataatttcgtatgagttttatgaattcatttcgtttttgacgaaggacgaatgtctcaaggaaacagtaatcttgacaataagggaaatagtaaccaacatcaagaactcactgcttaatataagtaacacattcttagttcccaggaatatttctcttttatttctctatccattcatttatagaagatatgagttcaacatatttgctgggcgagcttcttctgataatagttggagtcaaaatgagtttcataacagaatgtaaaaatcaagttaaattatatttttagatttaattataataattaaaaatttcgaaggttcgataaaagaaaataacttcacatttgtaaatgtacatgagattgcaatgcacctgaaattaatcatggatttggtggaagattccatgataaaacaaaatgtaaaacgaaaacaaatatcacctagttaaaattatttatgtatgtatttcatagaatgtgttactcgacaaggattcggaatttagagaaaagttggaagatttgtcaaaagtaaataacaccccttttcatattatttagttgattgataaatgcccaattctaatttcaatacaattcgaaaatataaaaaccaaattagtaaattatgatcgggttcacaacgttgatacgtcgtcctctgtaaattatttaggatttgatgaccaaacaccctttaatttaaaattgattcccaatgaatcaatcaattgcgaagaagctgtagatttaacaatgttataaatttcaatttgatatacttaaaaatgtatcggttattgaataaaagtaacatacctaaattatgtaattttacgagattctataatatacaaaatactctaataaatcgaaacaaaataatattcaaccaatgtaacggaatatttaatcaaaccaactcaatacacagaataaaatgtaacatagattttaacactaatttgttgaaaactaacaatgtaaacactaatatcaatatgttctcaatcaagaatacaaaaccttacacaactaccaactctagattaaatgaatcaaagaataatagtactgttgccaataatttggcgaaaggaccatcggttactggaaatcagctaaatagattttctaattatcagaatggaattaataatggaaatgtagattataaattaggttataacaacttaaacctgaataatggaggaaaggggtccggtccggagcaagttctggaaggagattctgtaactagtggtggtaagaagaagaggttccaaaaattcagacaatatatgagtaaaagtaagcgtatgaataagttaaagctatatctgagtaacagtaaaagcgtgaataaactaaggttatacctaaacaatagtaaacgcctgaataaactaaagttatacctaagcaacagtagacgtttggagaagctaagagtttatatacttaacaataggcaaaagttaaaaggattaacaaatagtgtcaaaaggcgtgaaaaactcaggttgatgaggtccaagttcaaggaaaaatctctggcggtaagattttaactatcttttgtaaacggtatactaattattgtgtagttcagactaggagctatgttgaccctgaaacgttacgggaaaattggagccataatttacttcgggtaagcttatacgactgatcatctcctttagtgtttatggagttaccttggttgggatgaatgcaattgtttttatgaactacttaacgagcgaagatgttaggagggctcttaattacttgaatattacctcagttaaggtcccagatgtggacagtccattcgctaagttcaccgtcgcgtatatcgcaacaaaaattgtcgaacctcttaggctagtagtgtcgattctactaactgtcacattcacaaaattgtttagaaaataatgtaacataatgtagtccttttatttatactgaatgctagaatttcacacactatatactgttctcaacctactcgcaccaacactatttttaattttctggatcagatttgtttgtaatatagattttttattttatttaataatggaagttgcaagtttgtcacaaaatatagaagaatatttcgataaaagaaattgcttggccagtgatctgaactactacgaaattctagaactggattcgagatgcacgaaggaagatatacgccgatcatactatcactttgcacgaattttccacccagacaagtatccaaaaatttatcaaattctatgatcttcctaacctaagcaatctgtttgtaggtgtaacaaagatgagtatttgtttgtactaaacgagctcaaagcagcatacgacattctatcggacgaatataaaagaattatatacgacattaaacatgtagcaaataaaaaggaggaaccgagttacgaaataaagaaggaaacactagaaaatgtttatgatttagttcgccagaaatatttaacttttttgcaagaaaaagcttctatgtacttgaatattttatactatcaatacaaaaatcaaggtactgaattttggaaaattaataacagtgtaggtttaattataaaaaaggcaatatttggaaacttgaatttggcaaaaccagataccttaaaccctctggaaacaatagaattgaaacacctgaaagggccgtttatagatgtgactgttcaacttcagcttctggtacaaaacggagttctccacctgaataacagcacatcatacgcatttttgccaggattctataacccaatccactttgtaaaaaatttataattaaattaaatagttgtttattaaataggttgaatttataataaaataaattaactttgatggttcaggataaaaacggcgctaccgattctcaactatacatattatatatatttaaagttagttcctaaacatttatctcaatttcatggaaattttcaattttttagaataaagtgcacgaagtcacaataaacgacaaaagtaacctttgcctgccaatgaaatcgcatttagtatatggaaattatataaaaggtccattctcaccgagtaatttatccttggttaatatatgaaaataaatatatctgttatttacacatggggatgagatttgttcataatgtttatatttcctaatatggcgtcaaaataatggccaaaacaaacccatcggatcctaaaaatctcgtatcggaacaagtaaacgttcacttaaataaattcaagtaagataaaataaaaaagctcaatatttcccgtagatacctgcacaaaaatgtattgaacaaggaatcatcgaggatagcatcctcaatgcaagtggtcgacgctttaaagcagttagcagagtatttgatatgggaagataggaccgatcaagattatatcttcgagtaggatccaaacaaaattttatgactgatttttcatttttagatacttctgtgaggaaaatatcatggattatctaacaggggttttatgccgctctacgtcccgaacaataagaatacaactcatacaaacaatgtcaatgttaatacacaatatcggtaaaaaaaaaactttgtgtaagtttatatttattttacaatggtcacatatgttcatgatgttttagactatatactaagcaataattatctgaacgagctgatatctgtcccagaaatgtacagcggaggggacataagcagctggacagtttcactactaaaaacaatatcatcaatactggataaatcaacgataaagttctttttcctacaggtaaataatgttagaaattatatttaatagaaaaatgaaacattcccactactggataaaagtttgctattcttgagtagccacgatagtatgaagcgagcacactttatgacaattatacttaatatattcagaggtattaaccaaccaaacagcaaattgttacgtttatttgtagtaaatgacaaggatgtaaatgactacattgtaaacaaatcggaaatattgtcaagattagtaagtgaaacaatttaaccccgttcatatatcaatttaggtgttgtacttaaagtactgctggcatcgccagaacaaatattacgtcaaacacaagtcgttcagtaacaccattttaagtgagatgattctttaaaattaattttcaggtgagtcaaatgacgtgctgtgtttcatcgaagagttgatggatttggaaatcgaactaattaaccaggtaattttaagaatcaaatttatttctagagaatactctaccttatgtttgtaatttgtttcataccgctgattagaagactagttaacgttgatgtgaacatggagaaacttactgtagatatcggttcatctcccaactacagtgatttgtacaataagctatcaaactccatcgggttatcatttttctacattaataataaaacactactctttaatacaaacagtgccgatactacgccaaatgtaaacatacaaaaccaatcttccccaaaaacaaacactaaaccgcccactaactcagttaatgacagtgagtcaaaagtacctgaagagaacaaaacagaaaagagtgaaaaaaacaatctactaagtgattatgaacacaataactttgatttacctaacgactttgatcttgataggggaggagatgttacaataaatgaggttatatataacatattggtgaccgtaataataaacagcaaaagaaaagagtttgttaatcccctgacagctctattattttcaccagttataccgcagaatttgttatacatcataacaagtagttcatccgataaaacaagtaaatctgcgacaaataacactaattcgccacaagtgtcatcagcagtaacaaccccaagaaactataaccccgtcgatgaaacgtttgaatataaaaactacaaaatcgatgaagaaaatgtggaaatctttcatatgttattatcgttcaatgaatttttaagtaatctaaacacattaaagaatgactccaatggtggtaatgatgatggtgacaagtgtgaaaagggggaattcgagtctgataacccttcagtgaatttagaggatagttcgcataaacattgtccagatgatagtagtaaaactgttctgaatgtaataatgggtttatttatatatgacgggttgaaatcgttaaagtataacaacgacaacaacaagatgatgaatttgctaaagctgctaattcacttacagaataaggtctttatttacaagaaaagtagtactgaacagtgtaacctgatggtgatattgaagagcatgtttaacaataacgagatttacctacagttattcaatgtgatcagtatcaatatgacgaatttcaacttcaacattttggtcttaaaactgtataactttttccttcaaaattacattaatttcaacacaaaaaacgagaatgacccaaatttagtggatagtaaagtgagaaatagttcagaattggagaataatgtagaagataaaggtgagccgaatggtaaggaagttgaccaaggagttgatttggaacctattaaacctgattccagtgtggttgataacagtaaaataataaaaatggatgctttgatagatgaaataaagttccacctggacatagtgtataacataattagaatttatatactaaactcagttgagtcaaccacaacattgctgtatttatcaattttttacgttgaatggatcaagtacattaagttgtattatagtacgctgaatttgacagttaacgatatcatgttcattgatgaaaatgacactaacgaacaggaagtcacaaacaccaaccacgaagttgttatcaattactcaccaattaacatattcaagagatacatcatggtaatgaattcaggaattatatttattttagatgatattgatacttaaggagttgtacaatactataagtgttaacataaacagctttaaaaagaatgatagaaaatacatcaaagatatacatgagaccaacgactacatatatgaatcgtgcccactattttataatcagttggataaattatacataaaaaatacccaaatcaaattaggtaccaacgattcttagatattccataatacatccactaaatattcaataatgtatttaatttataattgttattccttaaatattcaataatgtatttaatttataattgttattccctaaatattcataattaatatttaaatcccattaatttattgttaacgcaggaaatgtgataaatctagtcgatggtgacgtcaactttttcaagtgccttatcaaaaataagaacgagcaggtttgagaaattaaattcaaatcttggtgtagagaaatagaataatactcttgcacgacgtgtttttcatattggctaaagttaaaagaagccacggtagtcatagtagccagcatagaaagatgagtaacagctttgacgaggcagataaggaaagtgtgaacctggaaataacgtaataaaccaattaattaaaaatttatttagctgtgttcatttattgtggaattgtattattaagaaaatcgacaaacaaaacaacaaatttaatattttaatctcatggcaccccaaattcaagagtctaaccccgtcaaataggtaatttcgtatttaatgacccatttaggtggaatgagaatatcaacgtgatgacgagcgaatttgacataatattcaataatgttaacgatttaaatgcagttttaaagttacataacagtaacaagaagaacctgtcgaacaattcattactgtccttacaagactacttatacaactaatatactatgtgtagtacatgaatatcaatttttaatattagactactagtaaaaccaatataacacctttattacatgaatattaatttttttacaagattagtttaaaagttatttgtatttataattcaggaatatgtcagggtagcatggattttcccattgatcgtatttggataagaatttagcccttggatagggtttaagaggaggattaacgagtccatatttatcggtaaaagcaaaagaggatttaactctacgccagatcaaagcagtgttgtcctgaatactagtaacatgctcagttctatacctccagaggtcgtcccttagcagttcgtcgggaggctcaggaagaacattgacaagctttacgttcctagtgatgtcgtgtgtgtacttgacgcgccctgaaactagggaaaacaagctggtggtttttgtagaaacaccgacattctcaccagggtaaatcttaaagtggcgattacgagttacattggggttatgtgcgataaatttacgttgtttaaccaataattcaccaggcctaacatattccgcagagagccgtttcatcccaatgttagccttcttactctggccagtaggagatcccctggaaggtcttctgtaggcggagaccttaacagttttaaatcttgattgaattccattgaatttcagggattctattgagttcactgaagattccaagtttatgttattcactatggttgaaaacagtgaatttttacaatttgaaagtacgattctgttaaatacacctatcattattaaaaattctataataattttataacaattgtataattacatacacatttaaaaacacatttagaaacatattaaaaaacatattaaaaatacacttaaaaaatatatggttatgaattttcaaactgtttgaccactacaagtggaactctcttttgggggtactcttcggaaagtgataactgtttaatggtgcgatcagggggtaaataatctccaaaaatcttaaaaggacttttgccggaagatttggaatgttcatcggaaaaggagtgataagttaagccatcaagtgagggttgagaaacactgtgtgtaaactctagataatcagagtgacccaactcgcgtttagattttggaatataaacgcctttccgatcaaaaggaagccatctagtgtaattttggacattctcttggtttggaatccccaaaaaggataagcacgtgctcactacctggagaggctttttgaaagacaaaagatggtctgaatttgagaagattatggtatgggagttggtgaataatctggaaagttcatctgcacattctggaggggttaaagtatcagaatctccaaacaaaatcagggttaactttcccattcccccgactcttctgtacagttcacggctactccacagcggcatcctattaacaattccaagcagatttgaaattgcccttctggtgacgaaaagcgtccacagcatacggtttaacatagggtttagctccgtgtttacatcagaaacctcgtcaactgatacacactgatcagtttcagggcattcctctgaattttccacaggttcatccttaaatttagtctttggagttgtaacacgtccagcaaaacagcactttgagacgcacatcggggtacaaggtatgcaacactggatatattttagaaaaacaaccctcattggctttcttggtattagaccggctggagaaattaaaatgagcttctcaactaagtctggatgtgtttcacagtaagaagctgctaagcaggctcccatagacattccaataactgataacttcctaccggtatatcccaaatgattaataacttcgtccgcttggtccacataatatttcggggaaaaagtattcccgaatactttatatttagggtaaccacttaatccatgaccgtaaagatctaaaatcaatatttatatgatttacataccaaatgatatgactctgaacccgtttttggataaaacactttgataaattgagaatgtagtatgtgtagcattatatccgtggaatgttaaaacctattagattcaatttaataaaataaatatataatatcaatatttaagtacaaaatagtgattatacagccaatgaatgattaattacacaaaacataccaagcttgcggacggatcgccaaccactgaatagtttattggaccatatttaccattgaaaattttcccctttacatatgggcactttaaattacactttaggagccattttggtatcttatatccattttctaagcaccattctatggaaggctcagtttctacttcagatgagttagattcatcgacttcacgagggtcgattgaatctgacataattttaaaaataaaaaaccaaaacttaaattgatgttctaagtgttacaaaggtcaaatgaatcagctcctgcatacattagtggtgtaaagcatcatgcaaaacgataaaaaataatttttaaatttaaatacacataaatatgattcagcttaactttaaattactataatttatatttttacaattcgttcaaaattcgataattccatcacatacatcttcgttttgactccagaccatttcataaagtttagaaaaatcatcagctattttctcgtagtctgaacattcccttaaattaattgttgtattattggagattatttggtaaattggaacgttgctttcacccttcaaatattgaagaatacagcacattttaacgtttctgaaaattttcaggcaatttaactccccaaacacatctgataaacttatgaaagaggccttccttgctatgttaattttgttatacaggttatctacttctgtaacaatttcctttatggttgttttctgaattttctttaaagattctgttaacgaattaacactagttacaaaatatttttaattagtttacaacctctcaagtccttctggctccttttcctgatacagtgaacaaagtttccaatctctttattaattctacttattctacaaatttaaatattataatgtaaagaacccttctggtttcttgttgaacagttgattcactggaccaggtaaaagtgagaagttgaacctcaattcattaagttgagacttcatgatctcgttttgtttctcaataaaattatcaacgatctcagaaaactatcagtattcgataaacatttgataaaaattttataaatattaggtaaattaaataaaaagttacatattcatgtgaaattgtggaaatatactcgtttaactttggaatcccagggaaagggttgaattgagtgttaagaattgtggaggattcacaataggagcaaggctctctcaatgaagaacataattctaatttgggtgtaaagggataaagaatttatatatgaacaaactagttttggggccttgaatgggattggaggaggagttgatgattaaatttgagagtccccaaaacataagaagtgaatatggaatctgagaattattattaaagatctctagaaaataaaatccagatcaatagattacaaataattatttcattatttaattattatataggtaattataggtttaattgattttagttgggtggagttattgtcttgtgctttattaagcacgacagcataaaatcatttttagtttctaacattcacacaaatttaaataaattttatatttgtaaataatatacctggtatcttctaaagggtttctccatttttgctatcctctttttatttttctctttttcagcgttctctactactctgtgtttttctattttttttatttttacttttaatcacaaatatagttttatattttgaatttaaaatggacttataactctaaaaagatgagttccactcctttatcacacacgaataaatttactgaacttaaaagttccactgggtccccaaggaccaaaaggagcttttcaaaacacaacaacgaagaatacaatgcagtaccagttacatctgagttttatacaaaacgtattaactaccaaagttttctccgtccggctgtaattcttttattttcaatctatactatactaggtgtgttttcaaactgatcaatacttgaatattttacttatttttactcagataaattattatacatatattaatacattttaatttagtttcattgttgtcaaagagggaccctaagtccggcttctctctagctgtaatggcctttcacagtaaggtcatagatctctaccaagtaattttggatttttacaaaagatgtcccgctgtaatgtctgttgtaaaaaagctgagatttgaagttccctattttataaagattttatctttatacatacctaaatacgaaaaacagatagtcaatctaactaattacaatactctcaataactggctttctattttcgtttgggcaacttttgcagtcattatggaacttatcattgcagttgttaacaatttggtgctttctcataggtacagaaatacacctaaatattgctctaacatggttgatccctccaaatttcatgacaaagctttcacacaagaacagttaaacaaactgtatagaagcagggaatacgtcgacctaaagaattctaggcatggcctaggccctgaggcttggaattggcaactacgaaaaactctaaaaggaacgagggataatacgaaatcgcaaaacgcagtctcatctggagatgaatcggatatcagtacatgaatccataatctaatatacttgcgaatgtgtttatactttaactaataaattaaataattataatactagaaatcactaaagttataataattacattaataaataatggataataataaatattttttaaaaataaaaaatgaataaattatcaaataaaaaagtaaaattgaaaaagatagattattatttataatgaaataacccgcacaactatagcacaaagtaacgactaatttttagtatacaatgattctaaattgtattttatatatttaatttttgtaatttaagattttgtattgatttttggattttatctcgatcagagataaatgttaacctcttcaaaccatggtattccactaggtttggatcatggtgttagaaaaactcagttctttaacatttaagtatgataacagtcatagtaatctaaagaatctatgtattcaacatgtaccattctggaataacctgaaacatgaatctataactgtgaaaattatgatcgatggaataacaaatcaagtatataggttaagtttgacaattcctgacaatacctatgcaattaagtcagtatgtgttaaaaaaacatcgacatataattcgttagtatttgataatgatttacaatacaatgttgctaaattactaggagataataattttggtcctaagataatagggcggtttggtgactttactattcaggaatgggttgagggtgatacactaacgaatgattcattacaaaacctctcagttttaactggcatagcttcatcacttgccaagttccataaaagagttacagaacttgttccgaaggaatgggatagaacccctatgttcttaaccaaaatatctgtatggtctcaacatgtcgagagaataatcaaaaaacataatctggattttgattacactgaattaaaacataactatgagttatttaaacggatccttagcaatcacctaaatacatcaaattcaatagctaattcagtcttattttgtcataacgatctgtacactcagaacatacttgattttaatcaagggatatttttcattgactttgattattcagcattcaactacgtgggatgcgatatagcgactcttttcttcaaattacgtctcgtttacaatactgtatctcatccgtacttcgatctcgatgattcactagcattaactaaggaaatgaaatccttattcgtttcaatatatctttctcagctattagggaggaatgtttcaccatcagatgatgtcgtaaaggagtttctacaaagtgtagaaatacacactctgggagtccatttgttttggacatattggggaatagtaatgtaagaatattatgttttattaaatatttaattaatccaaaattccgacaatgtatataaatataggaatgaaaagccgaaaaatgagcttagtggaccaatcgatttccccgaccaggctaaattaaatcacaaccttctcattattgatctgaagaaattttcagataataatatttttacttaacctcaatctattttaacaggcaaatcctattttaaatattttatatttagtatcctcatacattattttccaacatggttgttaacattgaatagttgtttttttggaattttaatcatccaaaaatggattgtttactgttatttaatttttttaaattaaaattttagtaaggcaccttgcattttatctcgattggggataaatgttaaactttcccaaccgtgatactttaccaggtttggaacatgataataaaacgaaattcgactctttaacatttaaatatgattacagtcatagtaatctaaagagtatatgtattcaacacgtcccattttggactaatattaatcctgatttcatagaagtcaaagatgccaatgctggtatatttaatagagtttatatcataaaattaaactcatcagacaaagacaaatatccatacaaaaaaataactttaaagaaaaaggcagatttcaattcgttagtggtcaataatgatttacaatacaatgttgctaaattactaggagataataattttggtcctaagataatagggcggtttggtgactttactattcaggaatgggttgagggtgatacactaacgaatgattcattacaaaacctctcagttttaacagggatcgcttcatcacttgccaagttccataaaagagttacagaacttgttccgaaggaatgggatagaacccctatgttcttaaccaaaatatctgtatggtctcaacatgtcgagagaataatcaaaaaacataatctggattttgattacactgaattaaaacataactatgagttatttaaacggatccttagcaatcacctaaatacatcaaattcaatagctaattcagtcttgttttgtcataacgacttattttttactaatatactcgacattaatcaagggatgtatttgattgatttcgatttcgcagggttcaactatgtaggatgggaaattgcaaatttttttttaaagcctggcatagttcacctaaacgatccacctgcacagttttatttagatgattcactagcattaactaacgaaatgaaaacctttttcgtttcagtatatctttctcagctattagggaggaatgttttagcatcagacgatgtcgtaaaggagtttctacaaagcttagaaatacacacgttaggagtgaatttgttttggacatactggggaatagtaatgtaagaatattatattatttaaatatttattatatcaaaacttaacttaatacatttaaatttaggtctgacaaaccgaaaaatcagcttaattttgatgttctttttcacgttcagtccgaattaatgtacaatttgttcaaaaccaatcttaggagattaactgataataaaattataaatttctaaatctagatataaaattattttattttttactctagtatttaatataatatttcacacctcacaatttttcgtgaaacttccatttttttattattctgtgtgtattctaaattgtattttatatatttaatttttgtaatttaagattttgtattgatttttggattttatctcgatcagagataaatgttaacttcttcaaaccatggtattccactaggtttggatcatggtgttagaaaaactcagttctttaacatttaagtatgataacagtcatagtaatctaaagaatctatgtattcaacatgtaccattctggaataacctgaaacatgaatctataactgtgaaaattatgatcgatggaataacaaatcaagtatataggttaagtttgacaattcctgacaatacctatgcaattaagtcagtatgtgttaaaaaaacatcgacatataattcgttagtatttgataatgatttacaatacaatgttgctaaattactaggagataataattttggtcctaagataatagggcggtttggcgactttactattcaggaatgggttgagggtgatacactaacgaatgattcattacaaaacctctcagttttaacagggatcgcttcatcacttgccaagttccataaaagagttacagaacttgttccgaaggaatgggatagaacccctatgttcttaaccaaaatatctgtatggtctcaacatgtcgagagaataatcaaaaaacataatctggattttgattacactgaattaaaacataactatgagttatttaaacgaatccttagcaatcacctaaatacatcaaattcaatctccaattcggtcttattttgtcataacgacttatttttttctaatatactcgacattaaccaagggatatatttaattgattttggatttgcagggttcaactatgtaggatgggaaattgctagcttctttaaaaagatgtatttaatttatgacgacgttcgtcacacctacagttcctgtccatctccttgtttatctgacgaaatgaaaacctttttcgtttcagtatatctctctgaacttcttggcaagaatgtttcaccatcagacgatgccgtaggggagtttctacggagtttagaaatacacattttgggaactcgtttgttttggacatactggggaataataatgttagtttatatcctaattttaacaacatttaaatcacttatttttatcattttaaatataggaatgaaaagcctgtggatgagttatcgaaggcctattcattcattgcctactccaaatttgaatatgatttactcaagaatgaattatataaatttagttccattcaatcatccttatgaaatacgtaattcgtttaatttcttgtattttgcacctttgtacaaattataattattcttaaatttaatctttaaatggcaatgattgaattaataaaattatatcgtttatgaatcccaaattttggtaaatcattgttcatttaaacacgatttaaatgtgttgagtggcttaatgttgaaatgactgttttagttaaacatttcgattttctaagagtcctggaattagatataattagtataatggacaaattcatgtaataaaagtaaaagataaactatctgattagttcatatttagtcggggacgaatcctgacacaatttagctaaataatattaattataatatcttccttccataatttacacctgtttgatattatttttatgtttttaaattttgatttaatatttatttttttattattttaaataacattgctttgtcataatcttccatttcttatctaacatactttttctaaatacaacttatatttttaatttttaaaacaacagataataaattttgtttttaaaacaacaatggaccaggtaacaggtgtttccgaacacagttttcaacataatgaccaagtaaaaacttcagaaaatgaggggtattttctcaacgaaactgaaacaaacgaggtcaagaccgtttcgctaaaatatgtcccattatggaacagtcttacagacgataaacttgaacttaagattatttcttgtgcactgacaaatcgcgtctacctggtgacattagtcaaggaagataaagataagtatccatataaaaaactgatcgtaaagaagaggactgatttcaattcgttagtagttgataatgatgtacagttcaacattgctaaattactaggagataataactttggtcctaagataataggcagattcggtgatttcactattcaaaattgggttgagggaaatacaatggaaatagaatgttttcaaaacctctcagttctaactggcatagcttcatcacttgccaagtttcataaaagagtcacagaacttgttccgaaggattgggatagaacccctatgttcttgaccaaattatctgtatggtctcaacatattgagagaataattaaaaagtataatttggattttgattacaatgagttagtccaaaattatgaattatttaagaagatctttaataatcatctaaattcatcacaatcaaccaccaattcggtactattttgtcataacgatttgttttccctaaacattcttgactttaaccaaggaatatacttcatcgactttgattttgcgggatttaattatgtaggatgggaaattgctagcttctttgtagaggtaacgatactatacgatccaccaactccaccatatttcatttcatcaaaggaataccatttatctgaggaaaagaagtctctattcgtttcagtatatctttctcagctattagggaggaatgttttagcatcagacgatgtcgtaagggagtttctacaaagtgtagaaatacacacgttaggagtgaatttgttttggacatattggggaatagtaatgtaagaatattatattatttaaatatttattaaatccgaaattccattcaatacatttaaatataggtctgacaaaccgaagaatgaactatcaaaaccggttaaattggatgcctatggaatgttccagtataatttatttaagagcaatctgaggaaattaactgatgaaaaaattgtaaacttctgaatctatatataagatcattttgtgttttatctaattatttatttctcatctaaatttatcacctcacaacttttctctaaacatctatatttctaaaaccccttggatctgaaaatgttttgtttaccatcatttgatttttccaacttaagatctttatattaatttttgaattttatctcgatcagagatagatgttaacctcttcaaaccatggtagttcactaggcttggaacaacataacaaaatcaaatttggttctttaacatttaagtatgataacagtcatagtaatctaaagaatctatgtattcaacatgtaccattctggaataacctgaatcatgaatgtataaaggtagaacctatgttaaatggaataacaaatcaagtatataggttaagtttgacaattcctgacaatacctatgcaattaagtcagtatgtgttaaaaaaacatcgacatataattcgttagtatttgataatgatttacaatacaatgttgctaaattactaggagataataattttggtcctaagataatagggcggtttggcgactttactattcaggaatgggttgagggtgatacactaacgaatgattcattacaaaacctctcagttttaacagggatcgctgcatcacttgccaagttccataaaagagttacagaacttgttccgaaggaatgggatagaacccctatgttcttaaccaaaatatctgtatggtctcaacatgtcgagagaataatcaaaaaacataatctggattttgattacactgaattaaaacataactatgagttatttaaacggatccttagcaatcacctaaatacatcaaattcaatagctaattcagtcttattttgtcataacgttctgtacaatacaaatgttttagaaacccaacatgaagtttgttttattgactttgattttgctggatttaattatgttggctgggaaattgcgaatcttttcgtcaaattatgtgttgtttacaacgatgattcgcctccatacactaatgaatttgattccaatgttttaactaacgaaattaaatcctttttcgtttcagtatatctttctcagctattagggaggaatgttttagcatcagacgatgtcgtaaaggagtttctacaaagcttagaaatacacacgttaggagtgaatttgttttggacatactggggaatagtaatgtaagaatattatattatttaaatatttattaaatccgaaattccattcaatacatttaaatataggaatgacaaaccgaagaatgaactatcgaggccagttaagttatatgttcacggatttttcgaatataatttatttaagagtaatctaaagaaattaaacgatgatgaaattgtaaattaccaaatatagttataaattattttaaatgtatttttatatctaatgttctcattatttttctcctcacaaaattttcatattaatgtaaatttcaatccattatctatgtttatttacaatgtatcgtttagtgttatttaatttttgtaaattaaatttattatatggacctttaaattttatctcgatcagggataaatgttaaatcccccaaactatgatgattcatcaggtttggaacaacaaagttttaaaacaaaattgagttccttatcgtttaaatatgataatagccacaccaatctcaagaatctatgtattcaacatgttccattttggaacgatctgaaccatgaaagtttagaggtcaaaacaatgatgaatggagtaaccaaccaagtacatatggttaccctaactcctccttataaagatcggtatccccttaaatcagtatgtattaaaaaatcaacaacatataattcattggcatttgataatgatgtacaatacaatgttgctaaattactaggagataataattttggtcctaagataatagggcggtttggtgactttactattcaggaatgggttgaaggagatgttatggaaatagaatcacttcgaaacatatcagttttaactggaattgcgtcctctttagctaaattccataagagggttacagaacttgttccgaaagaatgggacaggactcccacgttcttaaccaaaatatctttgtggtctcaacatgtcgaacgaatcatcaaaaaacacaacatggattttgattacaatgagatgacacagaattttgaactttttaaaaagatccttaccaatcatctaaattcatcaaattcaatcgctaattcagtcatgttttgtcacaatgatttgttttttacaaatattctcgaatttaaccaaggaatatacttcatcgactttgattttgcaggatttaattacgtcggatgggaaattgctagcttcttccgaataatatatatagtttatgatccacttggcaaatacctcttatatcataatacccctcctgtggaagaagaatttaaaccaattttcctttcagtgtatctttctcagcttcttggaaaaaatgtttcaccatcagacgatgtcgtaaaggagtttctgcagagcttagaaatacacagcttgggagtatatttttattcgacctatttgggaataataatgttagtttatatcctaattttaataatattcaaataatttatttttataattttaaatataggtatgataaattgaacaatgaagtatcgaagccaaccacatttgatcactttgcaatatttcaatataacctatttaagagtcttctgagcaatttctcagatagtaaaatgtaaattactaagttgaaataaaactacctgttacttagtttcccttaatgtttgtatacacttcatctacttgagatttttttacacatttattttacgtcgttcctttaagttagttaaaaagggttttatttaatcgcgtatctcttccaggaatatatactagagtttgtgattgtagtttaacgttccgttttaattcataatctgtctcagttaaatatacaatccatattttaaacataaaagaaaccagtaactatattaaaaaggacaatggtgatcctataaattcggatcgtaaaaatttataatttgagtcctgaaaatgattaatttttttataaattactttgagtcctcagatgcagtgatcactgaaaactcatcgttggacgataaagcatcccaaatagttgttctataaaaaactttaagaaataaaatcttactggccaaaagctgaggttatgtccaacaccaacgatgaattattaattgaatataaagacccctcagagtggtttaaattatctaaagtaattgtaaatacaaattgaatagggaaattaaacatactgtcagacaaaacggagaaggttataaagtaattgtagttattaataaatgttgagaatgtcctaatacagttattccgttcatgaccgtaactcgtgatctgaaaaatcagtacattgtaaattaagtacctccttaagcatccttaagtcatataattttgttattccgtttagaccagaggataacagataatggttgttaacatcacacttaattgatattacaggcaaatcgctatgtgcgctatccatgctataaatacattccaagtttttagagtcccaaatctataaattaaattaagtattggctaatcgtaccaaaattgagccgtcactgccagcagtaaacagtaatgaaccaagtaggttaaagtcacaaccattgataccaccaccctaacattaattataaatattatcaaaacaaactttatgttggtgagttgtctttgaggatgtgtaacactttgacgtgaccacgtcgtacaacctaatgatggaattggatgtaccagcaaacaaaaagtctccacagggatggaatttcatacaccttatagaaaacatatcatttatacgttctgaaaatttcaattagttaaacttcttactcatttctgaagttgagtatataaagccgtttgaggtgtttatatcatggaaaattatggtattatctattccgccggaggccaaaacgtttctaaagtgtttataaagtttcaaattatgaaaatttaaaaattaacaaactttcttggatggaagtccagtgcatcaacttgttcaatatggccggaaagagtgtttgttgacaaggtgttgggttttctaataaaacataattggcaaattgaattacctcttttctctcttattcagcacattaataaaggggataactcttactgagccggacacgcctccgacagcaacgagggaacaatcatgtgattgagcaacacatcgagatggctaaaccaattttaggataataagaatattctaccttgtggttcagaatttcagccataatcctgtaggaaacctcgttcaaatccgggttcatctccaccggaacattagtgtaggacaaaacctccctaactctattttttccgctaaaattaaatataaaattacattttttaccattttagaacatcttcctcttcatttaacttagattccagtaaaactctggaggataaatatccacacttgttaaaaatatcaaacaaatgatccttccttagcatagagttcggtttaaccttatatttagattcaatcaaggctgcagcatcttcgaaactagaaatatttatatcaaagagaaaaaataaataaaacatacccatcatctacaagctgttgtaacaaagcttcgtagaaaaaaagacgttcaggctcaaccattaataaacaaattgaaagttaaaaaatcataatattaattaacaacagtttgcgattaaaaaaatatatctgtggagattatttgatgatggtcatccacacaaggaattcactttattatgtaacatataccttgtagcatagattttatcataaaaaatgaatagacttgtattataaaatggatgatgattcaaatcatttatctttctcatatagggagataaaatcatattttagttacggaggcgatgatatactgattctcggccaatttaaggcctttttatcgcaatttgataattgtttatttgcagctcctctaccaaataccgaacttccaatttcatccacaaatttgctgttaaaaggtttgattttatgcatcaccaactctcaatatttatttactcactaatgactgtttagaggcgcttctgaacgacaaagatttaaatttggatttagataagagagaagttttatgtatattagattccaacgaggaaaacttctataatgggaagagttacaataacaaatgtgtagtaactctgggaggaatatccagatttgtgataaatccatcctcggattttcttttcgtggttttctcaaataatatactttgcgtttactcacttttatcggacaaacaaaactggatttatttacatttactgtcaacagttaaggtactcaacagtttccctaatttttattctcagattaacaacaacaataacaatgtcaacacgatttgcgtgaatggaaataacgatatctgcttcggattaatggaaggaactgttttagtgtacaataataacaaattcaactgctcctttaagctgaaaaattcgccaataacactattgaagtaatagcatttattattaaatcatcaattatacaggtatttcaagtcggaaaaactattcatctgtaataagctgggagatgtatacctgtacgatatagttaagagatccaagttggcatactttcaagaccacacgacatacgttaagagtctgaactatataatcacaaaagaaaacgaaataggggtaataacactggataatgacaatattattaatttgtggtctttgagtacccgtgttgataaatcaggaaaaagtgaagatttagttataaatgtgaacagtaaaaacgaaccgattatcccttttaagagaataattaagcacgaaaacataacatcgattgaagtcgtgactgggaaactgaatgaggaaattgattctaaaaagaagggttcctggctgctattgatcatagaagagtctggccaactgtactatttagacccaataaacgaatcagtgatacatgtatgaattctagatagtttttatataattatttactaataattcttgtagaaaaacacagtcatgtacggctttggcctggtaaaaagagttgacttcactaaggatatgataatgcttctgagcttaaatggaacagtattactctacgacaagtgcttcaatttaattaaatccttcctatcaaacttcaataacctgttccagttcatactagtcccatcaaataacagtgaaaagttaaaagacccagaagactccgatgaagaatttgatttggatgacccagaagatgctcaagctgaaattgaaaaagatttacaagttcatattagaaattactatgaatacagcttgttttggtacaacaaatactccataaactacaaactgatgataatactgattggtgacgaggtacttagagtattattgctgaatagcacaaacgaattcataccgctgggactccacaacacaagccatacacataaagatgtaatcacaacaattcactacaacagggaaagtaatgaaataattaaatatttaattatatgttgctaacatttttatagaaaacctactcctgagtggttccaaggacaaattgataatactatgggatctgagcaaactaatgcaactaaagctaatcaacacaatttatatagtaacctcagtcctgatgatcccaagaccaaataacactctagatgtaatctccagcaacaacaatattattaatttgtacacagttaaacttagcgatttgaaacaggaattggttgaggcatctggggagagtactttaaataataatttacacaataacattgctggaaaagatggagagcttggtgacttaaacgccgataaatcaaaccacacatgtgttgtccacaaaacaaatatcaattacttatcaatatcccataaccaaaaggtacacttaataaacaagttatttaatactattaaggatttaaataacaatttttagtacatttccagctgcagcagcgacaaattgatagtggtacactattcaaataatctaatagtgaaggggaagtgtattggccatcgaaaatcagtattatacacagaattcatgaaattgacaaagacactcatcagcacatcaatggaccaaacaatcaggatatggaatttgagcaattttacaaatatcaagatattacaggtaaaacaccaattaaataatgtgatttataggggcataacaactcggtgatgaaagtagtattactagataacaacctccaattactgagttgtggactggacggctttgtgaaattgtggaatttaccaacctcagaatgcatacagactctgaataatcatgaaaacgataaagtaatataattatttactaaaactatttaataaaattatttactaaaactatttaataaaattatttactataaatactagaaaatttaatccatatagtaaaacttgatgattttacagatttgggacattgatttacataataacctcctgtatagtatttccaacaacctaattgtggtctatgaagactcgagcaaggaggaaagaaggttaaaagtgatgaaagaacatgaagaagagattgtaaaatcacaaataaactcactgatgctggaaaataactatagagagtctttggcactgtcaataaagctcaacaacattaagttgaccaatgacatattgcaaaagttcagaaataaagtgatttttcagggacaaaagttagaaaatgacccaatagactatataatagaacgaattagagaaggggatgaaaagttattgaataacttattgaactttattaaaatatggatcactaacagaaaggattacctgctggcaaacctgttcattaacaagctgttaaaggaattgaaaatagaacagctgttaaaagttgaagggctacttgaaaccatagacttcttactatataacctatcccaccaccagaatcgcttaacgaaccttcaggagaagtcctacctgatggacatgatcacacacgataacactctgagtgaattgaactctaatgcagtaaatgaagttttatacaactcaaaataatgtaataaaatggaatacactcaatttaaactagttatatatggaatttacactaattatagacagtttagaaatttataaaattttagtgtctattacgaggtttaaactcgtcctttaaatgtttcaggtgtaaacttggagactgagattgatgaggattaagctgaaagacgtctgaaacggcaatagcaagtttttctccggaatggttgaaactcacggaggcaacagtgccgttaaacttactgctcttccaaagacgttttcgagaaatgccgtcccagccacataaaagaccatcacctccaccagtgacaaaagttccgaatttggggtgaaaatcaatgcagtttacggggaaagcgacgtcagagtcgttaggagtcttattacgatgacatttaaaggcgtattgctgcgattcagattccagaaacctaggaaaatattcccaggctactctgccctcaattgagcttagtacatatccagtggcgtctggaaaacactttagaaaccgatattggaacttcaaaaccccgctaaaacattataaaaataattaaaatactctttagtctcggggtttgcgagcccagtgaatccactagttaaatcatacacataaacctgaaaatttttgttaaaatttgttagtaaattttttaaaaagttaataattttgttttaaaagttgttttaaaagttatatattaggtagtgtagaaattacccttttcatagaatcaccaactaccagaaagtttctagccaagtccatgcaataggttttcccgtaaatatcaacgtcgacgactggtttcaagttcgaacttctcaagtcaaataccctcacctttttatcccatcctccagtaatcaatgtatctgatgaataattaaaaatacaacggaattacttgtaggttcgtgatatcgaacacatctgacagggccgttgtggagtccaacagtgaagtaatttttagtttcaacatccaatagactaacattcttgttcaaatcagctagagccatttttttatcattttcgaagaaaacaaagtcgagaactgtggattcccagtctaggttgaacaataagcgatttttattaggttggtcagcatcataaaatttaacagtctaaataaagttatttatagaagaaacgttacctggtcccaggatgatatagcgagaaggttagtcttgttgccgaagagaaccttagtgaccacatctctgggcggcgactcgaaagtttcaaatgaatccatttaaataatacataaaaatgtaaaatctggttaaaaaaattagttcgggttaatatcgtgtaaaatatgctccagaacattatcctccccccaaaaggtctgaaaacaatcaatattcgggaaaataattttattttaaataccagattaatatttaagttaaaatgctataaataactgactacaatggatggttttaatagaaattcaaatgtgtaaggaacaacttacgtatttgttatcgaagttgatatcggagatgaagtactgaatttcgtggttatcgttactcttcttgatggtaacaagatatttaagtttctgaagtgaaaataagcctgctttcttgagtctggtgatcctttttatgttaagttgtcctccgaccttcttgtagcacttgactcccatgctccagaacttgctctcaaggcttgttgctactattatcaggctcatttggggagtgtagaccaccacttcaggggcgtagttcaagtgaaggttattgtacaggttcttgttcaccatattttgagtaaagtagtcgtaaatcgggtggagattcatctcgaatccgaaggcatttctcctgttagtgttattttcaattatcctgttgtagcaccctccgaatattaaatctccaaagttcctcttcccaatttccaagaatattctaaagtagaacttctcaaatattccctccctgcccccttggcgcaactgatcatttggaatgtttgagctgttgcagttactgctcaactcagtgtaagtcgggttaaaatagtgcagtccatcaaagtcagccagaaacttttcaaaaaaatggaggttttcaaggtaatggctgaattcctgcggcacttcacagttcagcacagcctccagccccttcttgagttcagacactctccccttaaatttgtgcaggaatggataaacgttgagcaaaactgatgacaaagtctgagaattaatggtaattgagttcaattcatccagaactcctgtaacctttcctttaactagtgcgtctgacagcattagcttctccacctggttcaggagttgttctggtacttttaaggaactgagtaaccttgttaaaaattcatagtggttccattccaagactagagcacagttgatgaacctcttcaggggcctagacgacactgagactagttcatatgtgaaaaatgcatctaggttcatctcgttttcgttattctcgttcaggatgatcatgtagtctacaataatgtcgtagcccagaaagtagttcatatttaagccctcaattctggacccaacagttccacttccatgtgtagagtacactggtgagtatacatatcttctaattatggtagtaagctccttagtcatacattcagacaaggaatacaggagagaataagtcaggttacagcacctaccattattcaacagcagtcttcctctatagtaattcctatcctttcccaaattcttatccctttctgcgtttttatccttttcaaatgctttatctctgtccaaaccaactcccttatccaggtcattgtttaaaaaattaccctttgaagaatatggcaagtgtgttagaaggtgtgggtgtaccttgtgtgcatttctcagtttaaactccttatcatagatcaatcctagttccaaatttacgtagtttattacgttgttactaattaccatattatagtagtctgtcagcttcttatactgctgtttccttgagaagatagtgttcagcatctgaacggactccattgagtgggggtactgcgtaataacattgtacagtgactggagattcaacttgttggaggtaaagatttcgttttgaagaatctcagatgctgagggtctcttgttggggtttatatttagcatcgactcgagtagcttaaagagtctgttgtcaactctttctctaaatccttctggccattgcttgtttggtgttgaaaaggaagataggatctcacatctttccatgaaagtctgaaaaggcttggaaagcatttcaaatagcactacaccagccgagtaaatatctactttctggttataggcgtcacattccgactgttctggtgccatgtaatgcagtgttccaacaactccattctcattaactattgtattctttcctaaaacactatttatacactattataactattatacctttaataaactattataattatttgtaattagaaaatatacctttggattgttgcagttttgctgttaatccgaaatccccaagcttaattgtaaaatcattttcaaactttagaaagatgttagatggcttaacgtctctgtgtattattcccttttcatgaatataactgagggcctccataatttgtctgaaaagctcaatcaccctttctggactctcgtgcaatgtttgtttatttatggtttcatacagagactcttccccgcagtactccatgagaataaacaggcactttttcggtatgtgcttattcttcttataatgcttattatgtatctttatgacgtttctgttatccactggtgaaaggtctacattatcactatcaggttcactatcttcattgaactgatcatcaaagtcaatttcctcaataaccctatcaagtttgcccttaaattggaactcattgtagccaggagtgtactcagcgttgaaaatatcctctaaattgttcttttgcagattagattggcggttgtatttagttagaaggtactccggtgattgttccacccaggcgtcgtagtaacgaacaatatttgggtgctggagacttgccaacacagctgcttcttcatggagtataaactcgtagttacggtaaattggtatctgcttcactgcgtagtttattgtattcctcaaaacctttattacacagccaaatgaacctgagcccaaaacagcctcctccttaaactctctaaagtagcgagagtgcgttatcaaatggttgtatatcttgtcattcttgtagattgttatgctgttgtacctcgtagtatctttatacctactatcatagctttgtccatctaaattatcgccttgtttaccgataaaattacaatcatttggggtggactcggcgtcagtaagtgaagagaacgagagtgttataaattcatcaaaatttgaagaattttctgttacttgttcaatatcttcatttcttgactcgtactgtaggaaactcttaaaatccactacaagcttgtaaatactaaaacttgacgttgttgatcctgaaaatgccacgttatttatgaaatagaggcacttattacgcagttttactgacgagtttaatatgcctttcaggtgtatacttggaaccttttggttatcggtcagttctatctgcaatgatactacacaatctttctttctacttattgcgtatatagactcctttaacctaatgtttacttgaaatttatggacttgggggaatggttcctgggacgaatcctcgaactgaattccatggctttcatcgtcaaagtgaaagtcattttctagaaggctatcctctagtttctttatttctacattttctagcttagaaatgagctcaatgtcttcctccaaacttttcggcagtttagatgaggacattagctaattatgatctatattacagtgtactggtttatgattcatgcttaaattttagaatactgaatgaaaaaactccattaaaattatatacaacgttatactatcatttaaaactgtttgcgataaaaaacattgaaaaatgtattaacactggagtttttaatagggtcacataattataagaaaattgagaatctcgtgataaattattatgtttaattttaactaatatatttattattatattttaaaaatattgtatattacacatttgtattatcaatgttaaatttctcacatagtaacattggctcatgtttccgccaataatattttcgtacacaaattctaatgtaaattattaaaaacatttaatttgaagttagaggatcgtttgctctaataaaaatccccgaaattcaagaaaggttacacaatttagtaacctcttataacaattttttaaactaattaaaatgggatctaataatagtaaactggaggataaagtgagggagaataagcgtacaataaacaggacgattcgtgacctagagaggcagaaattgtccacacaaaggcaggaagagtcgctggtggcaactcttaaggaggaggcgagggctggaaggataaaaaacgcgaggttattggccaaagatgttctcagaaacagaagattggctgatcatctttgcaatatgaaatcacaaatgacggcacttcaatctcaacttcaaactgcccacaacacaagcttgttatctaatagcttcaaaaacgtcagtgatctgatgactcaggtaaattgtaacactaacgttgctgagttccagaaaatcatgtcgaatattacacagcagggggcagtccttaacttaaaaattgaaatgatgggggatgcgatggaagattcgatgtgtaattatcagttatttattggctaaatagcttagattcactagttattcaattaatatcacagcaaataacggtaatttagatttggaagataccttacaggaggagaaggctgtagataagctattggaggatcttggagtgggtgtgggtgcgacgttggataatctaaatccccctaaaaatcaagatttaacctcttccgaaagtaaaaatatggaaggagcagtgagaaacaactcagggagaatgcaggaaatgatggaaatagaagaaagaataaataacttgaaaagttagatactttgacgctaggaaggcccatgcgcaagttaaatgtaattcttcagatggtcttgagtaaactcaaaacacaaagagtaatcgttatataatcgtttggatgacagaaattcgattccttgcattttctcttcaatcaagttgggtgtaaggctctccttaccacatgacttctgaagattaatttttcaatatcatcaacattattgttatttttcattttaaattctcatttctaactgaaatagtttatttattatttcagtttttatttacgccttggaatccaaagattttttaacttcctccttttccattttatccgctcctagctagccttaatttttggttgaaatgtgattagtttatgaaatctaaaatggtattgaggaaatctatttgcaatttatcaaagtatggaaagaagaatgacgagttgttttccccagttctgaacgactaccgagtttccgatatcacgaatattttttgcaggtcaattgtttctgaagcgtcaagaggcatagaaaaaccaaaggaacaccattgcaaactgcgctcaaactcatttaacagaaataacaagtatctgagcacacatgaccacctagtccgtccaaattcaattaggagatcacacagcctctcaattgacaggaagttgagaacttcactgatagcagtgaatgaattgaaaacccaagatgatcaaagaactgaaaaacggcccttggatgaggccaagtatgatttggagagcccggaacagaataattttgacctcagagattttaacacagttattaattcacactcattaaatcccgttaacacccttattaccaaagactacttgattaagaccaaaatttcaaagaacggattgaccagggtaaatgccagagattattcaacgaacaaagccaagatgaacaagagtgatttattaaaacgtctaagaattggagcttttgctccattgggattaggagtgttggaggggaacgccttgaactcactatcactaaaggaaaactctcgtgaaaagtcagatttaggaaggagtaaggtggtagaacgactgatggataaagttgaacgtctggtcaacgtgaagcgcgagaaggtagctgaattacacaataagtatgcggactgtcgtctgggagaagtcacactctcaatgttattttcaggactaaaagatgtgccggcaatggttactgaaacgagcgaattggacccattcaacggtataagatttagaggactcacagttgatgaaatgctcactgctttgcccggtaagaacccagattgtccatatactgagtctgtactgtggttcctattaactggagaagtgccctcacctgtggatgttgatgacctatcatacgagctttacaggcgtagcacggttccagaacatgtttataaggtgatagacgggtttccaactgacgcgcatccaatgacgcagtacataactgctgtttcggcacttcaaacagagtctgtattcagagaagcatattttgataagacctaccacaaggatacttgctggaagcttgcactggaagactgcctcaacttatttgcaaaaaatgtggtccttgtaggatacatttaccgcaggtcgtttatagatgaaaacactaaaccagcagatgtacagtacaactcttcactagactatgtaagttaagaaataattatataatatattaattaaccttaatttcacaatatatactattttaggccgcgaacttggcacacttcctaggaaataagactgaactcttcagcgatgtgatgagattatacctagcactgcactcagaccatgaaggttactatcatatatttatgttaaaatatataattatatacctatattatgcatattagatgaataaataaaggtgatttaactttattttaggaggaaatgtaagtgctcatgcttcacatttagttggaagcgcactggcagacccatacttttgcttttcaagcgccttgtgtggattatcagggccactacacggaatggcgaaccaggaatgtttagtgtggataaagaagatgctaagtgatttggaaggcaaggaagtaacagtggaggcagttaaaaagtatgcggaagacacaatggcgaggaaacaagtaattccaggatacggtcacgcagtacttaaagtcacagatccaagacatactgcatttgtaaggttcgcactgaagcacttcccagatgatccccttgtgaaactattagatacttgcctaaaagcaattccagaagtactcaaagcatcaggtttcccgatacacaaccagaatattaactagaatcatgttacataattaaatatattgtttacacgtgtgtttagggaaagttagaaatccaaacccgaatgttgattgttcaacgggtgttctgttaagtcattttaaagtcgatcagccacaaatcttcacggtgttatttggactctcaagatcgatgggaatattgtcccaactagtctgggcgagagctctgaggtaccctatagagagaccaaagtcgctctcactggaaaccgtcgagaaaatgtgtaactccccagaatcctaagaatttaattttatatattcacaatgttcttaatatttaagtatataaatgaaggtgaacgaaaatgtatattgtcctcgtccttctactagtaaacagtaccacagaaggtgttagaatatattctaacaaaattgactccaaagatgtaatttaaactaaatagatgtagataaatagctttgagagtgaggaagtcattgaaatttagggattaaccagaccgtttggaaggaactttacatttatcgcaaattttaatccaaaaaagagagattctagactttttgagaaaaaagaaggtaatttaagctaaaaacatgtaaaaaaggtgtagaagatggagataaaacctactgtgagaatgtttacaagagagaaaggttcccaacgagatgtgtaaaaataggaaaggtcacaataggaggaaatcacccaatcgctatccaaacaatgacgtcctgtgataccaacgatgttcaacaaacagtagatcaggtaatttttactagtttatatcatagtatttacaaatgtaaaaatcggttagatactgaaggttcaagagtacggatcagacatggttaggattacagttcaatcacccagagaagttaaatcatccgagttgataaaggagaaactcaattccctaaactgcgatataccgcttatagcggatacccattttaatgcaaaagtaagcttaaagctaataaactggtttataggttgcaatgctgtgtgcagacatattcgataaagttcgagtgaatccaggaaactatgtgattggaaggaagaactgggatatgaaggtgtataacactgaagaagagtttaaaaagagtggagaatacatagaagaggtctttacacccttggtgttaaagtgtaaagaacttaaaaaggcgataagaatagggacaaatcatgggtaatttttatatgaacattagaatagattagaatgagttagaattaacatattaaacaatgttaatttatatgtagatcactgagtagtagagtaatgagctactacggagacaccccgttgggaatggtgatgtcagcaattgagtttgcagagatttgcaggaagaatgacttccataattttgtgttctctctgaagtcgtctaacatatttgtaatgatccacgcatacagactacttgtgaacataatgaagaagagaggctgggattatccaatacatctaggagtaacagaagcagggtcaggtactttcttaatatcttacacaatatatatatttaacaatttatataatttatgtagttgatgacggaagaataaagagttgcttgggaatcggatcactactgattgacggaataggagatacaataagaatgtcgttgacagaagacccttggtttgaactgattccttgcagaaaactcttagaatcagttcaaaaactgtatccaggaactaaaattattgatactgatcacatgaatgaaagggataatgttggagagaaattgattccagataaatcatttaattatgatgactggagagattttagaagcattgaaagaagagaagtaaattatggtaaaagtatactgaactacgaagatagtaataaaaataacctactaaatccaaatggctcagtgggaactgttctacattcacatcacttgaataatagagtgagaatttacctatatataatctagttattctttattttaactacacttaaatgtgattaggttgagttgtacaagtcgttgggactggatatagttaatgggcttccttcaaggtcattaaagagcgtagactttgtttttttagaagacgttccatactttcacgagtataacaaacagagactaataaaggagttgatagagggaggaattaatgtagtcttaccactaaggaagctaaagtataacccaattaagttcgcaattggcttagtaacagttgatgagtataatctcctaacaaggtctactcccaaaaggtaccacaatgataacaggagtacaaatcacccagatagcagattaatgggaatagatttgaacaatgaagttccaggacaaccaatattggaagaccgagatgtagtggatgaattgaataaattggaaaaattagtagttaaaattacaggaaatgaaactgatgatcaactattagaccttttcaatacacatcaggttagaaattatatatatattcaaaaatgaatgtttagagaaatgaaacacttaacctgaataataaggatagaaataaccaaatcgggttcataatactggatattgatccgaaacttaattacatgtacactgttaggagaatatttggcctgttgaacaagactaaatgtgatttgccagtaattcatcagttaaacttcccaagtctagaaaatcaacaagtaacaacttttaatgaaattagataaattttaacagcttttaaatagattaattaatttgtaaatacatttttaactcaaaatttaggacatgttggttgatagttgttgcttattggggtgtaacttgatagataagatgggtgaagggataatcattaaatcaaaactacccattgacatcactaataaactgtcattagatattcttcaggttttttatttagtttttacttattttttactattcattactaatattttacacaattttaacttcattttcaaatataaagctttgtttagaacagtaggatgaggaacattaaaaccgatttcatctcgtgcccttcatgtggcagaacattgtttaacattcaagtaaacttgataatatatttaatatcattgtatctaatgttgtaggaaacaacagaggaggtgagaagaagaataggccatttgccaggagttacaatagccatcatgggctgcatagttaacggaattggtgaaatggctgacgcagatttcggttatgtaggaggctcaccaggaaaggtacgatattctctaatttttaatattgtttaggtggatttgtatgtaaaaaagcaattaattgaaaggaatataccaaaagaccaggcctgtgataagttaatagaactcattaaaaaacacaataaatgggttgaacctccataacataatcttatacaattctatagtatacatatgacataattctatatactacagtagtacacatataacacaatcctatccaattctttagtatacattaaacataatcttatataattctatggtatacatatgggtataaaaataaaaattagaaaatttaaaactgagaattgtgctaggggtggagcagccaggatgtgaaaacaccgaaagtgaagaagaaaccgaaagtgccgagtgcagctttcggcatatttttatgagctttaacccagagatgagacccatcacacaggggtcttttacaggaatatttacatccgcacatcagcttccttcctgaggtctgaggaacatacataaccggtttgaattctaaaggttaattagaacaaagtggacttactggatcctttatgtgaaccgtcacaccatggctgcttcttactgaggccacaggcacaccaccagtatacctaaattatacacattataacagtgaataacgtagttaaatataaagaatatgctagggtaaaacaacaataaaccagaaaataaaacttaaacgagtaaaattaattataaaaataataaaataaaataaaatttttatcaaaattgttacttgttgagaattagttttaacaaggtaaggatcagtaactttagattgaggaacggggtcgtgaggccaccattcactccagaccatcgtatcttacttaaatttacagtagaaatgaaatgaaaatgaaggggtctgctgaaaactaaaaaacatagtcaatacatacagaactggagtacaagacaatcacatgaaaaatctaaattaacaggagttatttaataaccatgtggaaatcacataattattaaaaatcttattataaaatttaagtcctcaataaatataaaacaatgtgtttaaatccgtgattccacttaattgggtaactctcaatttacacaatctcactttttttcaagtattctgaaaattatcctcaaaactaataaatattatacgaaattgccataaaaacaccaacaacatatatatgtattcaagatatcatattatatgttacacaatattattctagttcttctacggtttcggtggagggatcgaacgttggcgacattttaataagattataaatcttctttcgtacctcccgctttaactcttccacagtcttaccctgtttaacaatttacttgtgaattagttaaattacttaaataaataactaagtggaatagctgaaaaatacttttggagacactcgggatcctgccattaaatacattgtacagtttttagcataacaaggcttatcaagcgcatttttagtgttatgaacagctaaaattttatataatatatgtaaatatataatggagtaaataaatgtgtaatgagtattttgtaataatgctaatatatatctaattaagacataccgcatggaatgatatcgtagccattatcaatagagaatctgaaaaacccgtccttaaactcctgaagtctaccagtcttcgatctcgttccttcaggatatacaattaagtcaaagccgttttccattaaaactttacacctctatattatttatgttaatttagtacatatacctccataactcctattacacagtccttcttgatagatttagtctttgtctccttgtcgtagtggaagtagatggggacctgtccgatcatatgaagcataggcttcggataaagtttgtggagtgcatccttatacaaaaatgtagagtaaaatctctttccgagataggttgttacaaaagcatctgaaaattggtgtaattttaggagaaaattgggggaaagtacctgcaaggctaacatggttgaccattaaaatcaccctatttttgggatctctagaaggcaaatctgtcaaggcttcacatttccaatgtggattaatacaaaaggcggctaaaaagattttatctagtttcagtaaatgattaaaatcgccatattaaatatgaaaaaataataactaattaaaaagttactgaagtttacgaatttaaacgaaattttattgcctaacttataaaagtaatatttatccttgaaacatagtggaaaagtgaaaataaacacggaaatctgtattagaaaggctaataaaatcataacagcgagtataccgaggagaaagaagctctccaaggtaaataaataacactttaatttatacattattaaacaaattatttgaatcaaaaaaatataaaaaaatagaaataattttaattatttccacgacataatgtactaacacaacatacatcatccttcgattgagaaaatgattttagaatttttcacttattttactttatgtttttaaataattaaattttaaactatttatatatctaaattttaatcaatccataaactattttataaacttttgtaatattatattgagaaattttcaatatgataccaagtgtacaatatatttatttttgattttaacaattttaattaatatttgaaatggtccaggagtttgaactttcagactcaccaacgctccaaggtatttcattaacacatttccctatactaatatagaatttattttattttattattgttaattgtagagaatgttaaatcttcgcctgataaaacactttcacctatgaattacaattctgaggaggatacagaccgctcttggcgtttctctgcgagtgataagtcgtcttccttcccgtaccataagggcttaaataagactgttagtgttgatacgactttggatagttcccattccttaaattacgccgactcctgcgaaacttacaactcgtccacagaatctctagattcaagtagcttttaaccaaattttaataattttaattaaaatcattttaggcacatatattaggcctgagacaccttacaataggtttcttgaacgtcttaaagatccctcttgccatgatattgtcacagccattaaagggttcatctctacactaccactatatactataccattaggtaattaataaatgttatagattggtggtgatgttacctggtaatatggctcgtagtgaagttgctacaatatctcacaacttcatcgatatatacgcacctaaactactgtcggtacctttatcaattctattcaaaaaactattcaatcaagttatacttaaatcatattaatttattagttggaagtattttctaaattgaccgatgaggagaaattggagacagttgaatgtttcgaaaagttcacaatgcaaaaactctatccacagtaaatcatacatagtttaaattactaataaacaattatatacaaaccaaaactgaaattaaaactaaaacataaataacttttattaggtgttatcgtatggaccctatggatgcaatagaagatgaaaggctacaaatacagatgttatgtttaaactggatagagccgcatcatttggaaattactacaatgggcgatgtaaacattttaaaagaggcccaaaatcatttaaagaatttatataaatacagatcaccaagagacaagctgattattatccttaatttctgccgacttgtggtctattcaatacagaaagtcacgtatccctttaccctattattagtttacacattttattttacatcaatacaaatttttagtgataaggacgtgagttgtgatgaggcatttccactcctgatcttgacgataatattgacaaacccggtggaactgcagtcttgcatagaattcatccagtatttcagacatccaagtcgacacatatcagaagaggcatatgcgttcacacttctagtatcagctgttgagtttatcagggaaattggaaccagctcacacctgaagataaatacacaagacttccagaataaatataatcagaacaaattaaagtatgagtcaaggctgcaaaggttaaacagtttagtgaaaaccaactcgactgaaacagtgagtaataatacgctcaatactgtaaacaactcagtgaataataacaccaactcagcaaacttgtttgaccaacttaagaagtttaacctgtcaaccctatttaaaatgcccttgtttaagcaagataagaaggacgtgtacgacatcattgaaacactggaatacctggaaagctacctgcttgacctgcccttaacttaccagttcaaggagaatagcttggactcgcctgacctcatcagtgactggagagctcttgttgcaatgaaaaaccacatcactgaaaccatcgctaatgttaaaacacaagccaaaaagcttttataatttttcaaataatttatatacacacatacactatgaaatgtgtattagtattagtatatatatagcatatttatagtagtattagtatatatatatatagtatatttacatcagtattagtataaatatagtattaatgtataaatagtgaagtaagtatactaatcaacattgatggtcttaaaaatgttaaatccgtctagagcagttgagattacgactccaggaatatttctatggaacatcagctctgtaatttcggtctggcccatatgtaggaaaagaagctgttgaggaatgtccgagttagttgcactttcagcctcaattgagacgtcccaaattgagatggagtcatccctacaacttacagaacaaactgatgagtcgagtggatgccaatctacgcaagttatagcctttttgtgccattttaggtttgaaaggtaagtttcaggatatcgaaggtcgaatatctttactgacccgtcctcagacccagtcagaaccaaattattatctatggaatttagagatatggagttaagatcagtttctgaaacagttacttttgtaaccaccttgccatttctaacatcgacaagcctaaattaatgtttaatatgttaaaagaaccttaaaagtccatcacaagaaccagacaaaagtaaattcgagtcggtataactccactttaagtcttcaattgaggtgtcgagttgaagtggttttgtgttattccaactgccttcaacaggctcccattgaacaagagaaccatcacaggatccagtggcaagtctgccgttaaccaaaggattccaagaaacagcatatccttcagattcatgtaaagaacaagaaaacaaaggtttctttttatgaggagattcagacttccagttatctaatcaattgtgaattggaggcttaattagaataaattaatgaaaaaaattatgtataaatataaaatataatttattacctgagctgatgttgttaagttgattttgtatatcccaaatgtgtacattgcctgtatctgacattgagcacaccagtctactgttttgagggcaagctttaatgcgattgacaattcctttatgttttatgctggaaattcgaaaaacacaatcatcttcatcttcttcttcgtcatcatcaagctcgccgaaattcttggtcaaatttgaccacctcatgacgtgaataagggaatccatgcccttcgaagtgccaggttgagttccagaaacaacgtaacattcaaagggataattgaccctgcaggcaccaagatcgtcctttaaaatatcaaacgaaaggcaagaccaatcaagagtaatcctgtgaagcatatcgtaacatccaggtgatagttccaactcctcatctaattcagaatttagtgtgtttaataacatgtaactaaaaggataagatatgttaccgctatttaaaggcctttcgtcatttctccagaccaatttttgggatttcggagtactttctcctgtgttatcatcattttcatcttccaactcattaacatcatcttcttctatttcaaaattatcatcatcttctaattcagtgtcattgtcatttaaatcatgattgttttgatcttcgggatcagattcatcgttacacgaatcatgtgatttagattctaccataactaatactacatataaaaaagccaagtatattttacactaaaattataaatattaatctaaataaaagaaattattttacaataaatgtgcgataaagtttaattaaagtaaataatagcttacagtatcgggtatatactttagtttatttattccgtaaatatccaacacattggatatggacctctcgagattttcagtttctgtaaaaaaaggtaaatcgcatagatttcaatatgaaatcaacatcgcatataacgattggagctggtcgagtaactttttatcattaatcttagttaattctattaattcaatagataaattataaattatacaagatttttgataattataagcttaaaattataattttagggtatagaaccttcgcggaatttgaggaacttcagcgggatttggagcagaatttttgtgatgttccttccctcccagatatagaatttgcagcaggattaggtgctctagaacaccttcataacgctgtggattatttagatacatttttaaaggtattctcggcacaattttatctatacattctgaaattattgtttaggaattatttaacagaccagatacaagatgtagtcaacatcttttggaatttgttgatttaattcactatcttgatgaggttcctacaccaccagtggtacccgaactaccttttattttaccttaattacatacattagtataactattgtaattacaaattctcaaatattcattttatcaatattgattgatttcagagtaaattaatttcaaccacaagtgcctacaaccattcagtttcagactgtgttgttctggaaaatgaatgtgctcttatcgtcgcttatgaagtaccttaatcatcccctattttgtttaggagaaaacatttttgagtaaactcggtaaattatggtcctttatcgagctggaaactttaggagcaataaaaatatttcaatatggtattttctcacacttccctattatacttataattataatagtataaaagtatataattaaacagacgagtttgaatataaatttgttgaaaagaagtgtttgacatttacacaaaaggttcgatgtattcgttacgacgaggattcaaaaatattagttatgggtacagatttcggatttattaaacgctttcgactcttatttaaggaagatagcattgaatttgaggaaattgacaccttaaagctacatgaaaacgcaatactatcaattaacatatacgacggtcactattacacatcaggttatgacggaaacatcagaaaggtgaatgtaaagagtaacagagtagttgcaggaggacggttaactaaacgtttaaatggtcataaaataatgacttcaacagttaataaagacgtaatgttagtgggctcatcaaataatgacatattatcgtattatatggaacgggagataccagtactagtaaatactacaaaagtggtggaaccacttgatattaggaagattctagtgtgcggaaagaatctgttcatatcccacgggaacacaatttcatgttatccatacaataaaactacagtggatttgtccgggaataacgctaagcctaagctccaggcaaacacaattgaattgtgtactctagtgggttcaaacactagtaacagcactgctaatgttgataagagtgtgaatgtgagtatacctggagttaacaggagtgcgaaattctcgcccagttcaagcggctcaattttacatacaaataaggtctactcgattgttttgaggagcaaaaataaacagctagtcgcaggccacgatgtaattctttacaaattactcacacagttacttattttcattagttacgcgtatgacaagtagtaattagtgtaatacgagggcttacaccctactaaaatagttatctaaatgggtggaaatcttggcaaaattaacgtaattaataaatttgggaataggaagtaataactatttggtgcacgacctctgggagaatgttgtttatatggaaggcacaccgggacgaggtatttcatgataaattatagtctgtgttagcaagttcacttcctacacctcatggaaaaggacgatttgctcctctctggcggatcagacggcaggattagactgtggaagctccctgaagatgaaaagttgacgctctggaccccatcccaaaattcgacgacgtatgtacaccaataatctccatttgatgagactttactttcagtaaattgttgtaatattttaaaattaatgtagattttgtattataaatatatttgcgtttttattgattttaattttaatatttaatatttcggtaattgatttttaaagttccttgatcatctatagattatagaaagattaggctattaattaagcgagtttaaaatttggtgaatatatttttaaatttattattctctttaacttttccagactttgaatttttcttgacaatcttcaaataaatccctgattataacataaatgttagcaattagggttatttctccatcatttcacaaatcatacgttaagatgcctattcggcggatctaaagcaaattcaaatacagaaaccttggatacatacttaaatcgtgatgagggcacggtttttactgaaaacaaccatttactttttaatcgcaacaataacaggtccgtttttcgataactggacgacaacagagaagtttctattccaaagtgacgcatacacatcaaaatgtgatgaaagtgacattgtgggcccaccaactgataccttcaggtgtgaaaagcaacaaattgcaatcagctcactgctgtcatacgcgaggatgttcgagtttgcatcctcagtaacaactgggattttcgtagactatttcgggccacgaatagtggcgattggcggcgttttcctgtgcacgctgtcatggatcttcctggtcatgttcccgaagtcgggagcaatgctgaggatcgcaatgatattgataggcttgacttccaatgccacactgttcccagccctgacaatagaaagatataccaagaagtacaaacctcaagtgatgatatttgtgggttcttcatcatcgttcacctgctttgttattaagttggtggaattagcggcaagaaaaacaccaatgtcaccaaagatggttggactcgtattcatattcgtctttttgttgccgtgcctgattggttcttttctgttcttcccagataacttgaatgatgacgcgaagcgatatttaaagtacgaagaagggcgggaaggagatacggaggagtgcttagaaccagatactgacgaatctgaaggtttaaaatacaatgagttatctaaacaggtgtcagtaatttcacttgcacattctagatcatatagtagcaaatcaggtagatcaagcggtaaactgtcaaaatcagttgaaagtagatcatctcactcgaaatcagttggaagtaaggcatcacagtcgaaatcgtgcgaaataacaaagaggaatagttttaatagcaatgttggtagtataatggtaagcgacgagaatatgaaggagaatatggagacagaggagttagcagaaaccaagtcaagatggacatttaaagggtttttgcaggaactaaaatccgtagaggtaattttgtccacactgtacttctcactaaatgtgatttcaatcacatactcacaacaatcttacacaatcatttatagcgcagactcattcctgctgcagttcgcagaatacgtgctgccattctcatttatcccctgcatcttgttcatgtttataactaggtgcatttcaccatatacactgataatgggaattggagtaatctgggccttgatgcaactatgctcgatgttctacgattacacggcaggaatcttcattgtcattttcttcaacatctgctacagtatatataacacccaggtgtatatctacatcgagtcggtagttaataaggattactactcaagcgttctaggattccttaacacaatgggagggttcagcctattactgaatattttcttaattagtccgataacagataagaatgtcatctggacgattaatcttacactgctagtactgagggtattattcctgttcgtcttcacctttatatttctcagaaaacatagagggaagtgggaaattatcaagcctacaacttcataatatcatataatgtgtattacatattataattaattaacttccaattaattagtgtccataaaaatatttttagaaaatattttagggaattttattgtcaaatttattcgcaaattttgactaattaaaacaatgttagggggtgataaaatagtaaaagatcagatttaatatttgatcaagtatttaaaatcatgaaatacccctatctgtcatcactatttttatatttaagttatatgacttagtgaaatcaaaaatgaagataaggacgatccgaatccccgttcgtatgggcaactatacgtataggctacatgattttaagataaaatgcagatttggaattagactctttatatatttcatcctgttaatctttgtcggtccttactttggaaattggactaccacagagaagtatctgtgcagaattgacgtttacgccagcgaatgtagtttatctgaccggatggtcccggcaacagatagttttcggtgccctgcacaacgattcatgatagctaaactgggatcaatcataaggtcatcggtcctcacaattggatttgtcatgggccttctgttggatatccttggtccaaaagtaacatttttaattggcataataatgagaatcgtgacttggctaatcttctcagttaaacacgccagtaactcagcaatagtattcagttcagtgcttttgggtttgtcgagaaacgctatagcatatccgaccctgaccatttacatgtacacaactaactttaaggaatatgcaaccacggtaatgggtataggaatcaccttagcaggtttgtatattatggtaattgaacgtctgctcggttttacgggagcagatccacatcgctttacactatactcagtactgacgacacacattccatgtttgtttattggtctcatattatttccatggaagtcaccaactccaaaggttaaacataaggcaactaaatctatagagcacattgatgaccagatatctacagatgatttagtatccacagatgggaagaatacacctagttctgatttaacactcaaaaccttttcacaatcatctgttagagattccaagatctcagacttcagttccatggatacaggattatcggcttattccaaagatggcattgataaaggtaaattattatgtattcctgataaagatattctaactatatacatattttatagaataatttactgagtattttatggaatattactaatatatatttattaggatataaagataacacaatgataagaattgaaagatcaggaagtgaatccagtgacgtggatttagatgcacatgtacaaactgaaatatcaatggatgattcacaatggaacttgaagaagtttgtaaaatatttgaagagcctagagtactcggtaacatgctcgtatttcgttttgaattttctagacttttattttatgcagatgatgttctccacaatgtacggagaatacaatgacgtgatggtgctgaacgaatatttggtatcatttagctttattttaacgttttttattggattattgtacaaagtcttcaacccgcttacgatactgattttctcaaacatgtttggaataatatcacacttcatagcctttagcggtacgagagtggcaggctacttcacagcctccacactcatcgcatacgcctcaatactctttacgcagatttatatttacatccagtcgacgtttgactcaaagtattttggaagccttgtgggcacagtcaacacattctctggaatctcaatgttcttcaacatcgccctcatttcactcgtcgagaagttcagctgcatcaactacatacacatcgcaatgattattgccagatcaatctttgaagtagccttaatctttttgaacttcaaccgcaaaaaaagaacaaaatccatttaattttattccacctcatttttcaatttatttactttattacattgtatataaatttttatatacataaatttatgtaaatgtgttaaaaataggaaggatcttccaaaaccataataaaattattataataatgtttaaagatgattgaataaaaattaagtgactaaagttgcaaattatagtgacacattatgttgatctagggaaataaaattttataatttttttatattatattttgtataatagtttttattagtatctgtatttttatcaaattcgctctattgttgtattctattagcttctatttatttgtacattatttttatccctaacggatgttgtttttagttaagttagatgaatttattaatttcacaatacactgaacttacgactaatttttagaatttgtaacataaatcaaataaacttaaattataatgaaggtattctggctgtatcgattgattctatacttcattatctcaacaaccatcggaccgtactacgatggctggtcctccacagctaagtatttgattagcgaaggagtattttctaagttgtgtcaggacggagatgagccaccaaagctgttttacctaaagcctctgtgtgaccatcaggcttacactgtgggcagattactgtcattttacaggatttcagagtttttgtcaagcattttcactgggattttcatggacaaccttggccctaaatttaccgttttattttcgataatactcagggttgtttcttggattttgatacccttatgtaccaacgttcacgcagttatcatcctctcttgtatcctctgtggcatttcctctaatggaattgcgttcccagtattcactatcgcacaatactctaagaaatacttcaatgcgtgcatggttgcaatttccgtttctctgagtttcggcacgttctacacattcatcctcaaccgtattaagtactggctctcagattacaagcccatcaacatcattgttttcatgctcattctaacacatttgcccatttttatactctccctgtttctgttcccaaactccctggagaaagatgtaaagcttaatataacagaagaaatgcactctaagaagcaaaaatccctgtctgaaactcgtgaagaagctttatacattcccaacaataagtgggaatttaagacctttttatcgattcttggccgaattgatatcctcgttttgtctttcgcctccatggtgaatgtgatttcactcacttttgctcaggagtcattccctattttgtatggtgacaacaaaactgctctaactgttaacgagattttaatcccgctctcgtttgttttttccatactttcaacctttgttctcaacaaagttggttccgttcccatcatcctcttcctcaacgtcatcagcgcagtcatgcacatgacaatgtttttcaccaacttacccgcctctgtcttcacaagcattttaatgtcactaaactacagtcttttcatgacgcagtactacatttatttggacagccaagttcctatacagtaccaaggaagtattaaggggttcctcgtcactcttataggctttgtactctttgttaatattggacttaattatctttccaagacttacttctacaccagggagatacacctagcaattatggcaataaggtttttggtgagtttgccgctgtactttttcctaaagcgagagttgccttcacgctcaaagtcgtttgacatggcataatctgctattattgctgcatttcgtgtttattattataaatttatattacaaattattttagagtacttttacagattatgattacgggaatattttaaaataaacataaatcatcagcacaaacaactttatcataacaatataatatatatcctatattatattagattatagttacttttcactaaagcaaaattatcctcaaatgtactcctacatgcattgtaaaaattgataaagtacctgaattgatcgattgaagttgagaattgataaaccttttcatcactgagttcaggaaactcattaaatttatcaaacatctgagtgaacttcaagcaaacatccaaggactggataaatgaatgaaccacacgctcattacacataaatttcctatattcaatttatataattatatgtctggtacctttgtatttttgttatatattcgtcgtgtttatgaataatttgtaaaaagtcattagagtcattcatgaaagattcgagttcttggaaatttggaacaattacaagcgagtaaagactagatagtagaagagacagtctactgtggaggtaatgcctgaacgctaaaatcttcctaagtaataatcttcgttcagagtggattgaagcacttttcttctcagtataactagtccttaatttataatcaattagaaatttgttttcaaggccatacacaattctcctatgttgaatatgagaactaagaatactgagctaaataactaaataccgttgtaaaaatgttgtaaaaatattgtaaaaatgttgtaaaaatgttgtaaaaagttacttgatgttgaataagatttgaaatggttgatagtaaggtctgacattaataaaattgatgtctttgcatttgtagtataatatgatattaacccaattatcagaaccatcgtagttaaaaggtactggatttgaattacttacattggataaattgttttgtggtttgttataattcaatgtatcataattaatgctataatagttccatgatagtatttttatgttattatcaattccatcatgatttaatttgggcgttgaattatttaaatccttatccttagtagaatggtggacaattccaatgtatgagaaatctgaaactagcttaagtagttcgataacgtcctgttgattaatctcagtcttcaaatcaatagagtcattagccacgtcatagaatttttcatcttcagtacttttagttgaatttgttccatcaacaacactttcaacgtcattaacactactattgtattcattgtcaagtgaatcagactgtgagagaaaacataaatcactagacaaatcattagggaaataattgtttaaattatttgacaaattattatgaggtgagtagttatctggaaagcaaaactcgtcatctacagatttaagaaacactttaaagctgtttcttttgaacattagttcaattcccaactttaagttagattctttatattcaaaaacactctccattctactgagtaacgttttagtgtatttattgtcacattcagagccattgtcgtgatttagcataatatcaatgcagactgttagattggcagaatttaaaggattaatcctaaaactaatcgacaaacacttgttatttactgttctatattcattataacttctaccattaacagaattaaaaattttaggggataagaccactgaaaatcgtctgtactgatcgaccaattgaaggccaataatgaaattcatattaaatccattcgttatataaatgaggtcagaataccaaataccactttcatttccaagttcataacatcctttaataaacctaaaatatcatattttttaaaaggaaaactcactttatatcattaatcagtttgaatgatgaatttatattaaagtgatttacgcacttgattagttcaaatttatcagaattttgattttcttccctgttttcaccactcatatcatctttaagacgattaaataaggttgtaaaagacttattaacagattttaactcgttatcaccaaagtccatagccattatgtcgtacgattgttcaaagaatttgtcatatagtgactcgttgaaaaggaaataaatgccctttaacatccttattttattcaatatgttatacttgggattataaacatcccataacagtgtagaaatgtgtaacctataactttctatggctgaactgaatttctcagtatctaaagtcacttcattccaataattaaatatacagtcatcaataagtcttttaagtactttggtttttaaaccgtttttattcagatagtttactattggaattattttacctatcatgagaatagtattagcggtattatagtttacagggccaaatgttacattgttatttattcttgagtgatacactatgttattaatgaggaggaaatgattagattcagaagaactggtgatgggtgtatatgttaacaaatcattaatgaaaaaatttggagacttactgttcaaacctggattgtcagactcaggtgatgatataacaaactccccaaatgggtcaataagcttaccatatacaagccagtatgtaagttgtgactttaataatcctagtaaatcatatcttaacttcgaatttacaatatttataaattcatcagggttatcttggtacaaaatctccagtaaacacttaaacttcgcaaatgtatctttatatttcagtgatttgtattcatactaaaatataattaatcaatatattatatggtatataattatagtacatacgtatttaaaaatattagtaggtagaaaaatacctgtacgataatattgtataaaagttgtagaagtttaaactggttatctataaaatttgacaaagttgttagtgacactggtgaatgtgtgccatttctgaggttagtcaagtagttcctgtattcattcaaatatgactttatagaatttgcaaaacaacttaaataatatgaacttgtcaccaattcattcttagtatttaaattattatctatttcaataagttcatctgtaatttcctcaaaattggtatcaatttcaattattttatcggtattttcgataaaatcacgtggatgtgtgttatgggagtaaaactctaccgatgaatctgattcagaatcaatgtttaatttgccattattggtgaatatgaatgacaattcagaggagtaatcaaggtttggcaagccatcacaaaagttctttaattttttgtataaacggcctgttttagttattgaatcgagataattgctgtcgagaatctgaaaatgcttagtagaaccaacacattcagggtcaaaattctccaaatccccaaatagaggctgaacgaaatgattcattgtaatttatgcaaattttatcaaaatttaaatttaaactacattaaaatattaaaactacatttcaaaagttaaaacttaaactacattaaaattttaaggtaaaatttaaaaaataaaaaaattaattatctttaagagttttattaaagactgtgtaaatctagagtataaaataaaagtttaagtaatatgaggcaatgaacacttgcgagacagattctgtaatttaatccttctattttgaatatgctaattttacccttttctgtacaatattcttaaaaataataacaaatacagttataccaaaataattatctagaaatctgttaatgaatggtaatgatataaatgttaacaaaaccccttttctccactggattctacagtattttacacaaacctaatagaaatgtatataaaaaattgttttctactttgatttttaccaataagttatcccaaaataaagcttcagaacaccattctggctctctacacattcatttaaattatcaaaatggacgtaattcatctgattttaattataatttaataaagtgtggagattctactttaaattataaaaaccatttttcgactcgatcaaatgtaactaccaaaccactatgggacctacacagcgtaataattacagagttaattgagagatcagattttgtggctttggacgtagaatatactggactgcatgttaaggatgagcgttttataggtgttgataagtgctatgagtcccactctttgggagctaaaaagttcattccctgtcaaatcggactaacaatggctaaatatgagaataatatctggaatctaacaacgacgtcattgtttacaatcccatcagaagggaagagtttttcagttaacatgtcaacacttaacttcttaaaggataacaatttcgactttaacagttggataaggaatggaataacccatctgacacccaaggaagaggaggaaaggaaatcgttaatagtatcaaaactccatcagatacggttaaacttacagaatttgtctaattctaatattgaaaataatggcaggaacactaacaatatgaatacagaatatgatgttagtagtataaaggacttagaggatagaagagtggtggagcaaatgatagaaagaataaataaatggatagtagatgaaggtgatgaggggagaaaaccgctagaatttgaggttgaaagcgcctttttaaggcttttaatgcactctgtaatctcaattaagtacccgaatttgtatagcaattcctctcagaggaatggcgttagatgtgttgtagtttataaaactcagatggaactattagaagaggagcgaaaagtgttagaagaggaactagaggctataaataagcaaatcggactcagaacactttttgacacggtttccaaaaataataaaatccttgtaggccataactgtttttacgacattttacacatttatcaaactttctacggagatttgccagaaaacgtagaggacttcaagaagaagtgggttcaagtttttccaacaatttttgataccaagtatatttcagaatattaccaccagttcacacctcacacaaccttaaaatccctatataattcatttctaccaaatcaaaacggttttaacagagttaagataagttcactgggcaagagcgggatggttagtggatatggagatgtgataaatgagggagaaaaggaacatgaagccggatatgacagtttaatgacggcaatagtatttatacgtcaactcgagacggtaattaagagtaaaaatagttcattaaacaacttaattaatgcttacctggacacatctaacactccaaacggaatgggaaaggtaataaggaacatatttggagaaataatgaattcagttcggctggtgaagtgccagccttcagtaataaatatgaacaatgaagaggatatgtcaaagcacttttatatgtttgggtttccaaacgtgtggaaaaagtgggaaattatgaaaatatggtcgccactctgggtttcaatttcatggatagatgaaacctcctgctggataatagctaaaaactcggaggatgtcaagaacattaatttgatctacaaaatgatgaagaatccacagttcaaactgtataattatggacaatatttggaaaaaatgaatcaatccacggtttaatgcgttaatggagttaattttataaatattatttaaatatcagtggtttagtattagtaaatagtatattaggaagtaattaccaatgttattaaacaaattatgtataattagaaagattaatgtgttaattgaagatttatatgaaaaaaatgatagaaatggatagatgtgtggatgtgaaacaggtccccatcgtaaaatgtttttttagttgaaatatctgaaatgagataggtataataaagtaaaatacaattaatatatatgtaaagttagagcaaggatggcgggaggaaatgccaagcaacagaaggcccagcaaaaggctctggaaaaacaaaagcagaaaatcgtggaggataagacttttggcctaaaaaataaaaaaagcaaatcagtacaaaagtatttttcataattaactagaattttaaaagattctaattaatttctatcatttttattatcatttctagtatatctcttaatatatattatattaatggctaaatttccactatattagcatattattacttgaattttgtttgaaaatgatgtagatacataaagagtgtacagcagcagataactgggcaacctcctaaggatagtgacaagtacatagctcagcaaaacaaagaaaaggaggaaaagaatagaatcatgcaacaaaaagctctaatcgcatccctttttaaaagtatttgcatcattaaagatatttacaattattcttacaatatgtgaaaataactgtaatatttttgtagctacggagactgtgaagcaagtgagtatggaatcccagaagctttacgagcctaaacagtcgaggatggatcagaaaatcgatatttacttagatcaacgtattcaaagatctaaagaaggttcctttttaaacacttctaactagctaactagagcatgatatatttaatacatgtatggcatagatgacaatatgagtaattgggatataacaactctagaaggtgtagttcaacaaaaaaacactaacgcttgtacaactgatatcatctgtaaatacttcttgcaagcagttgagtccaaggttttctttaaaagttaaattttaatctttagaaatatggctggttttgggtttgtccaaatggcggtgatgattgtaaatacaggcattgtcttcctccaggttactttttacacatttctataatattaacgatattaataaaatgataataatatgaatattataatgtgcaatgttataaatgtgtgattaggatttgtgttggctagtgatgtgccacaagaagtggttgatgacgaggaaactctggaagaaatgatagaacgacaggtattagagattatattacagacgaattcaatgtgttatagaggagagaacttcctcctggaggagaaatggtaactgaggaatcatttaagcgttggaaggaagaaaaggagaagggtcgcttggacgaactaaaggacaaagtaactaaggattcaacaacgcagttgacagggaaggacctattcacctttaatccaaacctgttcatggacgatgaaggagctgcagacgatttcgactacgacgaagatatcgatctcgacgaactaattagagaaaatgaagagagtttaacaaaaggaaatgtacttccagatgatgtaagttcttttacaccgtttattctacttaaatataccaaaataattttgataattgtgtaattctaaaaaagcagagtaaaaaatagtatatgatcgacctaactaataaccttttaggtaacggaatctctgaaaacactttcattgtgatctatatcgcaaatgtatacttgatctaaagtttataatttagtatttaattgatttacacatttattccgtaaattctccccaccaactttattcttgtacttagtatttatttttcaactataaaaagcaccaattatttttttctaacttcacaaaaatttcctagtggttaatttttattttaactccaattttaatgggaaaattgagtgatgtgacatctgaggtactttccagttatccttcaaaaacctttcagaagtcccccaaggactctccagaggaggaagttacagataaattaaataatatgggtttaaaaccagagacccaagatccaaaacctgctggtacagccatatataattaatttttccgattctattttaacaatttgatagatgcaaaggattctcctccaaagtttaattttggtgaaaaaaagaaaaaaagaacagttgatgccggaggtatgttttattctctttcacctatttaaagaattaatttatgtaaggtttgatatttttgcagattctcctaaaactgagataattgatggaactggacaggttttcgttaaaggacacgtttacccatatgaagaggtattaaatacattgaaattattatatttttacaatttttacttatggaacctatagttgctggcaagaatacaatctatgattaacgccaataatcctgatctgagtggaagcaagagatacacaatcaagccgcctcaagttgttagagttggctcaaagaaagtcgcatggattaattttcgtgatatctgctccatgtacttttttatacgatactatcaatttattttgtttacttaatccactttaacttaaatattgaattaattgtagaatgggaagaagcatggatcatgtgcatcaattcgtattagccgaactaggaactgaaggttcaattgctggtgacgggcagctagttttaaaaggaaagtatggaccaaaaaatatcgaaagccttctaaggaaatatatcagtatctctagtttatatagttattcctatagtatttatacgcaaatttatataattgtacaaaaattgcataaaaaattttatagctgagtatgtgacgtgctcaatgtgtaaaagcccgaacactactatggaaagagattgtagagcaaggttatttacccagcattgcgaagcctgtggagccaacagatcagttaatccaattaaaaacggcttccacgcactcaatcgtggcgaacgcagaaaagctaaagtttaatatactattactaatacataacgtaatgtacagtgtaaaataataaattagtgtgtttttttcttgttcctcaatacatgtttgacaagtaaactgaaaaattattagtataaattgtgaaatgtgggtataaaataattaaatatttataaatagtcgcacaactatttgttaataaatttgtaaaagttaatatgaagttgtaataacgtacaagttgaagaatagtccgaagggaacaagaagagcgtagaaaacaagaacggcgtaaacagaaggtagggaaaggttcggcatggtcctaaggccggtgaacgggcatttctttccgagaagaacgttgacgtcgaagaccaccgatttgaaagcactaaatgaaaaattgccgaaaacacgagtgatcacagtaaaacccacaaaacccgccaagacaagacaggcatcagtaacgagcaaaagaagcaataaattcttagtgttcaactcagaaagcttcaagtgcgaatttttagggaaagcaaactaaaaaaaattattaataataatctactactgataagtgtgtgaactaaagtatattgtatttaatagtaaatagactagagtataacttttttggattgcgccatggttatattaaatgattgatataaagtgaaaagtaaagtttataaagaaaataataaaacccaaaaaaacagcttatttaaataaaccaaatttgtcaaaagcgtaagtaacaaaatcgtatttaaggtttaatttcgcgttgtgaaccaatcccaacaatagcctcatactcaagggaaaaaaccaattcctaatgttgctacatacacaaaattcctttaatttttttattaaattctttcattttaggcaatttactgaactatttattgaagtttagtttagaatatttttaattttaatcaaattctcgaaattgtgatattataaataggatatttcttacacatttttttattatatataaaacatgtttgtaatttaatattgatgacaactgtaatttttaatccttaaatttggttatttatccaaatttcttcttgtccttccattacccgatactagttattttattcaatgtattatgtaaatattcactattattatacacattgagaatttttataatcatttctactatttaacttatttttttaaatttttatgatgattctttcatgtgatgtttttaacgtcaaaatgtctcatctcacattttatcgttctctttcaaatctatcgcatttcttcctttaaattcccaaataatatcaatttgtatcaaaatggtattaattttattttgtgttaattcaacataaactattttattttattttcacttaaaacttctaatttttaatctgtagttggaaatattcacgaatttgttctatattctgaaaaaagacataaagaagccatgtttgtatgttttcttccgtattcttattatatactatttattctctctattacccaaagtagattctacacattaattttaaaactttgttaaggatgatttagggtaaaaaatttcacaggaaaccaaagtctagccaagttaggcatcacagaatagttggtaggggaggtggagtttttaggcttaataagcgcactaaattacctgccaaaccgatagttcttccgtatcggaggtattcgtcacactgtttatatacatatttattaataatacttgtttttccttacaacacattgttagatgtatgctattggggaagatggacaatacaaaggctatgcagataagccattcaggagtgaaaactcgtaagcctcagaagttaaatttacattggaaaaggatttggcatcctttgaagaagtactttataagacttaggattacgatgcgtggccttaaaacaattaaaagactcggaatcgttgaagcggccaggagatttcacctaaatatcgacgacccgaagttatttgcaggctacgctaatcttaagcaaaagtattgttacttctttaatttttctttagggatcctgaacctactactgaaactgttactactagtgttccatctaccgttagcactgaagttacctaattttatacaatatattttattttatacactgtgtaatacccacactactgtacacactaatagtgtgtagtatataaataatgaaattcatgagcgttgttatcctgtttaaacttagttttaacaataattagaggttctttgtaggattccctaacagctgttacgtctgcgtcattgtctgagaaaacaaaaaatgaagagccacttccactcatagaaaacttattcttcttaaatctcctctttagaattttctgtaacttcttcacctttgaattagttgtacacttctccaagtcattattgactttgtagtatttaaaaaaactattatctgcatcaagagggttaattttgttgatgagattagcagaattcataataacggcgtgaaaatcacatttcgggagtttcccagaagtgattaattctctggccttcttataaactgctttagttgatacgctttcataaggtattaacaagtacacccagcctgaatataagttcctgttataatattcatacatcttatcacctatgccaaacacactagccaagttacctaaacttcattataaactataaatttaaaatgtgtgtaacttggttaggtatttaactgggtaaaaagtacattctgaagctaaaaaaggtaaatctgatccgatattggcaagtccaaactttatgttggcaaataaacggttcaaaactacagcagcatcagaggaaccgccgcctaagcctgaacctatgggaacagatttcctagtcagaactatataattctcatcctgaatcctatacttgttcaaaactcgtgaaattatattctcatcatcaaaagggaaatccaaattactatcctcatttacctcttcaactacacaataacatcaataacatatatatatataatacacatacggtaggttagttaagagtgagtataggtaatctaagcctaaaataagagtgaaatacctttaggtgtatcgtcaatgagtaaaatgcagtcaccattttgtgtcaaatcataagattttgcgatatttttggattcctcgggggttattttcttaataaagatcttatttccccaagtcaccttctgcattaaagtacacaaattcaaatatttatccaaaatattagaagaaggatcaatatttagtgttaaattgatcttagcaaaagaattgtcgacagaatcccagaaattttcataattttcggaacctaagatgaaatgtgtaaatgtgtttcgacatacggttctctttcagcttattgttaatttttttaaaaacctcaatttcatcagttaacaaattcttattctttccgccagtaactagctctaaaacattcagaaatgctacgcatttcaacaatttcatcaacaacaatttctaacactacatatttagtatacagacagttattttataattttaattttgtaaattatataaattttataaaaatggatttacaatgatttgtaaagcaatttctttgaattttttcaggggcttttccacactcaccacacctcatgttactcgcaggaggcctgtttggaaaattaagcaaacttactaccacaggctttggaacctacttacttctaagaaatgggacgagtttcaccaaactcttcagctaatgaggtttccattctacacatcaagataaactttctaaatttatgtgaataagctaatgaatttttagagaaaaaggtctcaataatgatgaggtaacgtatactttaaaggcccattactttatcctcaacccttacgtcgctgttgaaaatgtactactaatctcttacatcactcattaatgttttagtgttatttggtaattgaggagatgaaaagagccttaattcaccctgcagttattagaatgaatgaggtacaaccactttcacaactaatgttggtttagaatttaataaattcatattttgaacttgaagaaatcggctgtgaacctccaaaattactctggcaaaacttcactaaaatgatttttcaaacttctatcaggtaattaatatttcctattctaccacttaccacttagttacacacattttaaactataactaaaatattattcaggttaaatagggttagaagacacaacttgaagcgacagttgcttttaaaggatcctgaggatgtcatgaaattaactgacaaggttagactctctcttctacaaatattacaaagactataattattttacaactttgtcacaattgtttaggacgttgaaaacatgctcattgaggaacacaatagtaacttaattaccccttttatgtcaattgacgagatccatgatgacccaattgaagttaatcccgagaaatttaagccaattaaacccaagaaattggacttcatctcactttactcattacagcactatgattctgatgggcagactgatattcagtgttaagggaaacaatgcgtagaacaagaagagcagattaatgacaccaccataaattcttcctcgatcttttatttttaaattgtaacttgaatgatttggttaaattactatacctcttagttagcattaggtttgggtcacagatatccaaatcaaagtccaaatccataaaagctggtgaggagtccagtaccagccgtgccaagttcttcacgtcggttttaaacaccatttctataaatatatgagtatagatattatgaatatagtaaataactgaatttactgttacaagtaagcgagagaaataccttttttggagataaaattcatttgtttaaagttttctaggctgttttcaaactctgagttacaaaagttctcagcatccacagcgtcaagttttaatttttcagccaattcaagaaagtatttctaatggccataatatattttatatctaatggcttaaacttgaatacttagcactgtagttctagctaatacaaaataccttggaatcagttttagaaatggtttgtttaagaataatagaggatttgcaaattgcaagtaggagcaggagttggaaaatgggtaaatccgacagttgattcttcaattgttgaatcttatttagtgatagcgttggtgtcactacaccaatttctttacttccaacattatactttgacatatctacaaccaatgttaatacagttggataagtaaataactaatatgacgggaataattcagtattagtacctaaagtatcataatttctagttggagtcttgaattcttcgttagtgtcaacttgatctattagttctgaacttgaaaaagagtctggtcccacagtcgtatcagctgatccgaatgattctactgacacgtagtctttctcaatatcactcaaactactagaaagtgcccttctacaacattatacatactacatactacactgttataattaaatagttaattatgggtaataacgaactaataacagcaactattactaacatgaacgagtccagataagttctacagtcaccagaagtgtttgcaacacgtcttgctattagtaacaaggaagttttattcagaacttgtgagttttcattgagtgacttcagtttttccataacaatattgaccatttggtcctcgttatagggcttaaatagcatgcgttcacagttctcagtcttgatcttgctggcaaactccaagttatttgagatggccagcaccacaaccttgctcttgggggaacaagaagccttgaaaagagcctgaaccagccaatttgacttgtcgtaactcttaaagtttgaagtgaaactgctcaaatagtccacttcatcaatcaaacatattctaagccattatatatattaatggagtataataaactgttgtgtacattattgtatggattatagtatctaatacactatgaataattagatacttgagagatctttgtgactgaaagtgctggatgagatgatcacagaatttggaataatcttgaactctgccttgagaggctagatttagagttttatgagctttttcggctgagaaaccaagcactttctggtaaaaatcattcttaaaagacttcattgaagtgtagttactgccctttaaaaaagcacttttaactcctttcttaccggaagtcagattttttagagcatactcaactgttgtcgtttttccggttccacagagcccaaatataaacattccgcctccctttttatcctcaatacatctacaacacaaatgatccacttttgctaatcaatcctatggttatatcgaaataagaaaataatatagtaaaaattactttgacaaaaaggacgtcaattggtttaattcatcttctctgaatccgacgtaagagttatcagagatcttgagaaggtcaatagtaagcttcttgtcgtttatatgtttctctaaaggagataaacaagaggaatctaaagacgagtcacacatcaggaatttacaaaataaaaatattatacattaattttacacattggttttttcaacaaacacaaattttaatactatcacttcaataatttaaacaaaaaattaaacaaataaaaaccaagacaatattaacaaaataatattgtataatctttgagtataattcccataaagtaagttgtgggattaaaaaaaaacaaaaatgcaagattgccgataaattttcatgtatgatttaatgtaaattataattataaaattttatcataaaaatttgttacttgtaaattatcctaatctataaatgctgtttcaactaaatatataaaattgtgtcaaaatgaagaaaaaagatcaaaatagtaagagtaaatccaaaaaaccaaaggtttttaaaaatggcaaaagtaaaaattttaagaaaaagctaaaaaataacaataaagtcaacaacagtaagttgaaaattaacaaaaactctaataaagtgaataaaactcccaaaaaagctaataaactgaaagaatctaagttggaatataaaaagcgattaaacgtaattttataattaattataataactttcagaggtcatattcgttattacttctaaatcacaaagattccataaaatccaaagaaattatagatgctttgctcaaggatttacccacaaatttctcagaagtaactattaatacagttaatattgattaggccattaataagaagaatgtgtcgaggatactacaggcgtgtttgaagtacggcgactcagatgttagagcctcaatttcccagaggttcagagacggacttaaccttactaacctcaatgcacacagcagtaaattccttataaagctgtttcactactgtaacactgaggttaagcagtttctgaggacttccttcttcaacgagaagcagaagaatttgatttttaccagattctcctccgatgttatggacatcatttactctaaactgagacctaaagaacagatttcagttctacagctttacacattttccaacaccttttacctggataatgatgacaccaggaaggctaaggaagttaattcaatcaatcagttgattcaacttattgcatcatcatcttcaaaatcttcctgcttaggtaatttttatatggttttttgatacttagtgttatttaaactttaattaccttaattatacactaacatacggcttatttttgtatagaaaagatgaactcggtaattacaaggttggctgagaaggaattgatgatctcaagtctatcccacgacctactgtttgtatacgtgagtttgatagaggataagaccgaattggtatcgcagctgtataagatttacggccagcttttgtctaccagaagtggcaacaactccattctctcactaatagactatgcaaacgctaaaattaaaaagcatgtcatcaagagcttgaaacgtgactttccagaagcagtttataataagattaatgtacactttttgattaaattagtaaatttaacagatgacactaaagtcttgtatcaatacttagttgagcctcttctagaggatttaaaccgtcttctctttgaccagaattcaaccaaatttgtcctaaacttgttaaacactgttgatgtaacatcgccaaacacgtaaccaaatatttaaaataaactttaaaataaagttaattattaaatttaaatattttatctataatttgattaggttaaaggaagataatgtgaggaaggaggaactgcagaaggagttgttgcctaaattggtcgactatttcaatcagtcagacttgaaaacttgtctacttgacaagcattgcagccaagttctattacacactttgaagctgtcgaaagactctaaccttttagactcagttttaacgctttttagtgaaaaattaccggaattcctagataaccagtaaatttaaaagaaaataatattacggtttaggctagtgataagactgtatcagagcatggtgaagtgtaaaaataaaataagtgaggagtttaaggcgtttaaagtaagtgaaagactatgggattctgtgaaaccagatgttaaacgagttttgggttctaaagcagtttttttactgatagatttactggagtcgttccaagtccaaaaccaaaccgagctaattaatgatttcaagaatactgtaactattgttatgatcaatgaaactaaaaaaactcttacaggtatagagtatatatagtttaacatatgtttagatgagaatattacgggattgaatatattaacgaagttactaacggagtagtcaggtgggacgatccaggagttgtttgaggtatagtaaaaatttaaagttaattttaagtctattcttcacatcctcgacactgtttacgttattattcagcatcaacattaaactattgtacactttataaagttttattacattgctgttgggattgttggcgttggggctgttagaaccagtaagaaacttaaaaatgtgagtattggtgttattcaactgtatagaatttaatatcatctgtaactccctcatcgtttcatcattctgcgatttcaacattccttcaaccctttcaactatttcattattaacattggtggtaataggactatctttgacaatggtatccttactattgaaattattggtatccttagtgttgaaattattgctatgtttactattgaaatgattggtatccttaatactgtaatttgtgtcagagttattgggtgtgttaagagtagtgtgtgcagtattgacagagtttaaagggtccagatccattttatcattagaaagtctaggttcatagctcattggtgaactccgttttgaatttctactgtttatactgttccccttactgatactattctctttagtaatggtgtccttagagctgtaattgttggtgttaatagtattaagggaatttaagctcatagtactattgagggaattggacttgaaagccttaactttagtggcgtatctgagagtgttgagagtctgctcacaagactgaaatgaaggacaaatgttggcaatcatgacatttctactgtcgcccatgaacacgtctctgagcaccttagtgagctcactgttcctgaacggaatatggatcctatcgaggtccatagccctgatgcactccttgagagcaagaagagaccggttaatccctgctccgtcaatttgaacttgtctgcacatcgacacggagtcagcagctctctcacttccagccaaatcaacaaataacatgctacctactagaatatattaaagtgtataagttagtaaatagtgtaataaagggtataatatagtatgttatgcacgttaagagcgttgttgaaatatattttattattgttaaatatataactggcgattagtagggagtataaaaggacctattgagttatttgtatgtcttagttcaattcttaaaagtgcatgagatcttgaagaacggtcattttgtgagttctggccgattttcctcaaatttaaggcctccaacattgagtctacaagctcctcctttgaactaacaactctttcacacaagtcctttattacaacttcattcttcccgttatccaacgattccaataacttcctaacacatgcatataaataaatattttaatgaatatatagtattgagggtacctgttctgcaataaatcatacaatttaccacagtaaatctcatagaagctgacgacaacgtcaactttaccgttgaactgaggctcctttgatatttcataaatatcattagcggcatattcataaataccaatagcaccaacgttgctactgtctgattggttaccgctgtcaatcttggaacctatcattgtgtatgttttaccacttcctgtttgaccataagtgaagcaggagcaggttttgccttccctgaaggccgattcaaccaaaggcttcacatactcgttgtaaatcagctcattgtcggccttttcatcatagaacctatcaaccttaaattcgtgctcttctataaaacttgtaccgtcaattttatatctaaaacagtattattacctggtgttgttaaagtaaaatagaaaataaaattagttagtagaataaatgtaaaatgtgtgaaattcctgtttaataattaaaataactaaataaagtgtattgaggatacttaaattcccggataattgctgaatcgtagttgcatacaacaatatccctgtcgcctcttgaaatttcctgctcactcagggggcgtttccttacaataacgtcaattcttcccttctctgaagattttctagccatttattacacaccaactaacaacaattttgtttaaattctcattattttcacacatttacgttatttttagttgaaattacatttacttgttaatttacataattttagatttatttaaaaaaataaaactgattttgtcaaattaggtaaaaaataaacgacactacacttcgatccataatggatattagtatttcaaaaatatcattaaaaataataaaaaattaaatttacaggtttttaaatgtaaaaacacgtggaatcataagaaattccaagaacttcgtttatttcagcttggtaaacaatcttagtgtattctcataaatcctacacacaacccggtacatatttatatatagagtaaacacactaaaatagggcagttagtgtgatctcacacctatccctgactatgtacctaagtataagaatactggttggtaaactgtgtaaagtccatgtttggatcaattaactggtgcacaacttctgctacatttagtatgtggcaaggttcagttcttatagtgagaacagtttctggtgtcatttgttccggtcgcttcactgtattaaatttagtcttcacatatttactactggaatgtgtactcttaataccgcaccacggtgaatctatacacatttaacaatgtgtaggttacctgtttctaagagtagtttgttgagaggaatgtgtttaacagtttgtagattagaatctgttttaagtgaacatccattaataccaatgaataagtcctcttttaatacagtttccagagagtttaagtctgatgtgaaactatggaccacacctaactcccatttgtctctatttctcctcaatatatctataatcatgatatcacttggtatataaagtaatagtatgttctatatagaataagaatggtatacccataaaatcagctgttgcttctctcatgtgtaaaaataaaggtaatttgtgccttcttgataattccaattgatactcaaaatacctaaaaactcattttacactttataaaacctatatatatatgatgtatgaataattatggtttaatacttgttttgtgtttgtttattgcaaaagtttaaacggtcataatcaaggcctaattcgccaatggctacaactctatctctattctgagtaattagattatcgagggcctccaaatactcagattcagttttattatatttattcttcacaaattcattacaacgagtcggatgtactccaacagtcgtgaacaaatatttgcactccttatctacaaatagtatcaataaagtacctaccataagtgttacacaagtccaaagcttgatgaacttcctccaaacacccggcagtaataactatcttttccattccaacgctcttagatctctccaatacactgtaaaatagttttataatcaattgcacatgaagataaatagtttaattgatgaataatttacctattgagatcaggatcgtgtttaagggaaccgttataataacctcgatatcgagaatcagttaaatttgcaccgatatcgataaattttggcttaattgaaccaaaatcctcatttcctctcgccattggaatattagctctcaatttaaaactggaaggataaggtttataagaaaaaactataggagtcctaattaaccagcataatataggactaatcctcataatacaaagtaaaaactacttactaaaacacatctattataaaaacataataaataataattattttattaaatatatgtggaatcattacacactataatattttctattaacgttttttaaaactttaactatctaatttttctaatttttatttacttatttactaaaaccaacttaaatttttacacaaaataccattgtataaatagatcaagaagataacaatttaataaagaataaataaaaatgcggttaaataatgaaaactccgagtagaaaggagttggagaaaaacttgccgaaacatgtacttttagttcttaacaagtgtttgttgttgtatacttctctggccaaattagagctagagctgttccgaatcgcaggagtattgctggataatcgcatttcaaacttgacaatttttaacgcagatggttactttaaccgctatttatcactgaaatacaaagattgtaataataaaaggttggattttaaagctttgacggaattgtgttcggtggaaaattcctatctcgctgaagatttagatgaattttataccaccgatcacacacttatatactatattaataaggttaacaatgatttatttatctcaactcaaaataataccaattataaaactcaaaaggccctaactcttgtgcttattgataacacacattcacacgcgaaacttttaaaattgactccgaaaccaaaatctacaaacttgaatcccacctgggttcgggagaaatcaaaaaaaggtaaaattattttagaataccaagtccctgatgaatcctctattacacatccagatatccaaaaggccttgtgtacttttaatgatgttactgtatcgttacctgatttactaatttcaattcgcttaaccctatttgacctaatcactttcattttcaactatatttacactctaattttaaacaagttaaacactttactaaagcccatattttctaagttaaggataaaaaacataaagttcgataaggaattactgaaatccgcatctgtaataagacttggtgatatgtttacaggtggaatgacagttgtccatgcttttggaccctcaggagttcagccttggttcctttcagaggctgaaatttacgaagtcttcggatttaaaactatgcatattgtaaattgtattaatcaatttgcaaataccattcgaagatgcggaaaataattttctaatatatactatacataatatacacagtgtatatttattccacatataccatgctatatacatagtgtatatgtgatgtatatatactatgctatacgtactatatctgatatactatatactatatacaaacatagtatatgtagtatggtacattaattcaagcattctgggtttgtaattgtttggaaagtagagttagttgcgatattttgagtcttctcattaatttacgattagtgtcattttgcggtaagatcatcgaaatccctaaaaacactaaaattgtcaaaagtacctaggagtgtgtttaacaggcttggatatatgtctggctttaacaaatgtagtcttagccttaaaaatatgtgagtatccatcaactggaccatatggtccagctttaccaaaaagtccaaattcaagttcattccacttctaaaacaatcaattaactataaattaactaattataataactcaacttaataagcattaaaatacattttatgtaataaatcgtgtgccagatcatatttttctataaataaagaaaatgacaacgccgatgataaattataactcctacagattttgaaataatgtaaaaataccaaatttccaaaagttggtctgaaagattacttttttctactgtcaacaattcagttctgaactcctgtgcttcctaaaatcttatattggtgttttaaagtactgttgaggttaatagtgtccaattcaatgagtgtaccatatcatacaaaaacccctcatcctacgaataatatactcctatactacaaaataatacactaaaagtgaatatattgtcatacatttgatagtttcattgaattggtaataatggtgtaaaagcgttcaaatcccaactgtttacataagtttaacactattactcttccgctatcctcctaaacagctattttaataaaatttatttaccagaagtttcttttcagtcttaaacaggttcaacaaatcaccagctaacagttgtaagtgacggtcacctagtgagattagcaggaagattgtcctcaacgtcgactccataatcatctggagaatgtaaaaatctaaaagtacctgtgagtgagggtgtttaaaacactgaatcactgcttttgataggttttcagacatcggatccatcttctcaggactatacaaatactatttcccaaaattcaaaaaataatactacataactagtgtaaattacagataaactaagtatataataccaaatctgtaaaataatactgaaccaatccagaattgacagtataacatgttcattttgtgagtcgactaatttatcaactagcactttaaggatgtgttcgatgtatgagattgatttaacctcactgacaatatgatacagtaaattgttggcctccgttgcgattttgttaagttcttcgctggggtctgagagttgagagataatgaattccaggagtaggaagaagcctttaaaatgtatgatttgaggctgaattgcgcatatttgtctaatccacactatgttcaacaactttatcacatgttcactcctcttacaatttaacagtaatatcttgaaaaaatcctcagttatcatgttactctttgaatacttcttcttgaactttatcaagaagtcgttcaaacacatttccgcagagctcctcacatctctacacaatttttataatttacatatttttagtctactctaatgactaaatgatgtcatctagatataaataatcttaattgttgtattacttgttattatctgttaacatgtttgaaatccctagaaaaaccttcggcaaatactcgagcatatcaatttctactcaaaaattaatctctttcaacattacttggtacagaatttaacattacaatccatgaaatctacatcaatttttaacactagtttgtaaaattatacgttaaataaagctataaattaactaaaatgctaaagaattactataagttgtctgatttgtgggtttataacaagtattcgattagccaagatgtctgtaatgaggtccagcggaacctcttcaaactccaggattgtgtcacacaagagtctattcaatatttgtgatgcatatttcacatcctcatcaatatcacatgtcaactaaacaaatttatcagtttcatttagtgaaaattaactaatcaaacataaatttggtcatgtaccttgcagattccgtcaaaaatttcagcaatacacggcattgattccattttacacttcttcacaatgttatacaaggcctattttaacaatttaaactactaattttccagttaatgactaaaattagcagtaaaatcataaactatgtatagctcaaaatagagttctcttactaactagtcatggtaaaaactacatacttttagctaaaattatgtttaaaagtcacctcgcaggaataatatctcactttattatcctggtcgtagaaggatagaatcaccagcttgatgaacttctcggaaaagtccagtaaatatttctaaattaagcaattcatccaattttctattattttaagatatttctaattaattaaaataagaataattaatatgtgtaggaatttacgtcaagtgagagagctgtacaggctatggccattaagcctccaatacgtaggtttggatccggctgatccaggaatttgaatttaacaaactcaagaaatgattttacagtgttattaagtgtggaatccttctcttcattgctgattgtgttactatttaaggactgtatgaacttccttactgaggagtcaattgccacgaggccttttttacgggcctctaaactgacctcgccgattttactaaggacagtttctggtataaattcatgtgaatctggcattggaagaatatatataatgtatagtggtgtattggtgggaaaagaagcaagaaaattatttgaactggaatttaatggttgggataacgacgtcgacgtcgtctgagtcagtgcagctcgcgtcaattacaaggtgtgaacatccgactccaatcttcttctttccgagcttttccactaactaaagataacatcattagtgtgtaaacaatcataaatatgataaaggagttttaaaagagtaaaataccactgttaacgatatttaaaactattaaacctttatatatcatgtgtaactagtgtgaaatacaacaatgatacctcagtaataactgcattcaacctttcgtttcggtgttgcggtagaaatgaattatatatacacaaatttcctgcagatagtatgatgacctcaatattgaatttgctccttatccaatcaatcaactgtttcacagtcccgttgggaatcagcactattaacttattccacactgtgaaattgggcgggagtgctcgcactggtccacaagtgacaggatcataatctttatccttggtcggtatgggcggtaggggttcagattgaagccaaattggtgtagccaagcacgcaaatgcgttcctaaagtgggtaatcttaagattcctataacagagcgccttaaggaactctattgtcactaagcctccaatcattgcagttgtagttgctatcgccggtatgatctttccacttattaatttggccttcattttgtcacattcctttattgcgtagttacggcatctgagtaccgatgctgaccagatgaactctatgtggtaattagtctcgtcatccttttcaaattccactgcatcaagtgtcctgttcgagtgtgcaatctcatgtaataacgggtcattgtctgtggttgtatcagattgtacctccacgttaagtttgtcttgcgatagtttgagtactctaggctggaattctggtaacctgagccctcttagtgaaagtacatctgattccaccacatcaacatccatgttctaaaccccagttaacaatatttatgatagtatgacaatgacttagaaagtaatggctaaatgaataagttatatatatatatatattagtattaccatcattgatgcaaaaatcttggtcgttgagagtatgaacaactggacaatcttatcgttgagatcaaacgtgagtggtgttggcggtcttttcggaggactccaaaacctttgaccgtctgagagtacgtggtccttcgggaaagagttcaaaagctgctggatgttgtttacaaagtggaggttgaaaagctctgaggagatcctcaacaggttctcctttacatccttcggtgtgcacttaagcagtttagatatcaattctaatctttcatacggaatttcagcaactcctaaatcaacattagtattgtataataacattagtagtgtataataacattagtagtgtataataacattagtagtgtataataacattagtagtgtatattgggattataaatataaagatagtaatctgtaccttcatcattttgtctaatcttcttgatatctagtggaatttgtgtgaaaagtccttcaaacacatctctagcccactcaatcgtgtgctcaacttggtatggaaagtgtttaagggtacagagtggtattgatgtttctggtgggtcttgactctcactgtagctctgagtcacatgtggaattaccacttgtacattcccaagtgttcctagtgttccagactccaccagaggcttttcataccagacacatctaccatcaacatactgtcttgcctactccaatattagcttgtttatcaatgaattaagtgaaatacactaattagtatatttacagtgaaaatagaagtacctgcacattatccagagcattaactacaatatttagggatgaccagaaatgctcatcaaagatatcctcagtgtcttcaccaactctaatctcaagtggtttcactttgatcgatgggttgatttccagtgccgactcacatgccactgatgatttagccagtccaacatgtctctacaaaattatccagatgtatcactacactaactactctctggtttaacgagtataactagtgtagctgagtggatactgtgcggaaaaggaattgacgtgaaatatttgaaacttcaatcctatcattatcagtgattgtcagtagcccgtctggctgtgatccacatcccaaaagtgcaaagtttttcaaaaattcacaacccaaagctccagctcccacctactcacacattatcaatattttattcatgtaactgtgtagtcttatgtataatctgaacagaagacttacaatgaatatcttagagttttgtagtttattctgtaaatctgacccccaaagtgaaacttggtcaaagtatcgttcgtcaaatcctctccctgaaaagtcacctgacaacatctcccttggtagtgagaaatccacataaagccattgattaattggatgatatttaccagtgaattttatcacctaaacaaacatgagtaacccagttactaaaaagtaaaataatgaagaggagaaacgttacctcatgggctactataccacctataaacgaagccagtggtgggactttaaaattaacttgcgacataaaactcttgaaaagttcctcttcaaccgactccactgcacacgatttggcgttagagttcatcagctgggcattagttagtgtcgatttggggtcaccattgccatgtttatagcccattacaatccaatggagctgttctgctctattcgcaaggctataatcgatcgtgtagagacagccagtactagaggggttaaggacacaatcttcaaaactgcggaactcaattctcttcgggtatctaacttcagtaaccaagccaccgctacaaatatataaccgaatgcataaacaataaaagaactaataacaagtattcaggtaattagtgcaaaattaacccttaaatgtataattatctaagcaatacctggtatgaggcgagtagtgggataaatctcctatgaggaaagaatttttagaattgactttaatctggactggttctttattattcagttcagtcatgccttcaatttctgaaaatctaacataatctccagtttgaaaatctatcactccgtcagttattaaggttactaatccttccttatcctatacaaaacatatgaattgcaacaataggataaaattgtgtaaaattcttaaaattaaatatcaatcaaaactcaataaaacttacgttagttattgattcgatgattccagttttgagttcagttccagtgggatcaaaagaaatgaaattatcgccgaaatcaacgaatactgagccgatcataccgaaagtatcacaggctatgaagccaactctttttccagccgagttggctctgcaaattctgttcaaactcttcaagacttcaatcttctgatcacaacatactactacatcattttccagcaccaaatcctacaaaagcattaatattatataataggttttcaggatgaagtagtaaaatagggactagaagaacgatctgaatggcacacatacctcattaacagtgttaataactttaatatcaacatttctatttaaatccttgagattatttagacaggctgaagcaatagtctctttccctacactgccagcccttacaaagtaatttacgcccaaatctctcttctgtactatatcattatcgaatatctttattgattctacacccatcaatgccaaattcttagctacagccaaatgttagaataatttgaaaattttacaaatgtttaataaaatttataaaccaaagaaaaaataaatagaaaatggagtagagttgtacctatttcgattcctgtagacttcataccaataatgagtacattaagtttttgcaatttacccatcatatcaaatccgaaagttccaatttgtctggaatacagatttgtatcaatcttctcctcgaacgacatttttttgcacaaataatattatattacgatttcaggtataataattgtgtttaaatttatattatgtacatttgatttttttaatgattttttaatttcattaaaaggtcaacaatggattgtgggatttcccagagcctaattacataaattttacagctattttttcatacactaatttacactaattgtatactgattaaatcaaagaatattaagattctgcaagaaatgtagattttttttaatttcatcttcgtcttttggataaacatctaaatttacacagaattcatttattacgtttatttcttcttttatatctttataatgcgattcaactgattttattaactccatcacagttgttggctctgtagaaactggctcggtattgatattcctgtaatggttatatagtatctgagattcctcatatattttatcgatttttcttaaatttttatcttgataggattttaataatttttttatttcgcattttatctctaagattttattactttgtttttgtaagtatatttttatcacatctggtttgttcactattaataaatttattaaaatcgatccttctaccgcatcataactaactttcttatttatttcatcattgttatccttaggtatgttatccaaaccttccagttctacatccatatcctctatagtgttagtgtatgaattgaatatgtagtcagttaaatcctcattcgtgccgttagaactgtgagaaatattgaagagaagaaacttctgtaataaaatttctagagctctgaaattaattttaatgaccaacttaatttcattccattctttaatttctcggtcaaatctctcccttaaatcagtacacatcagttcaatcaaacttctttaataaatctaccaacttattattccccttactctcaaaatattcctatatcaatgccattagtaggtttatttagaaaaaaggaataatacacttttagaattaaattaagaaaattatatttctgttccttagaagtaaataaaaataaaaaactatatattgagtacttttaaacaagatctataatctctgagttttaatttacatttatcattaaaattgcccttgagaaagtcgtttttgaaccaattattaaagcatttatcatacaaatccttcaaatgcttacaattcccctcctaacacattaacataaacgatgatctacacactaactaatattctttcaacattacttacactactcacagaatcgttggggccagaatcctgtagaatcatgttagggaattccaatcttcaaacttttccagtactcagctcatgaagatattttatacataataattaagatttttacgacaccataatttattttatacgatttaataaaataattgtcgtttttacaccccattacaaaggcataattaatgttacaaaatcagctcagttgatatttgtaatttaattaatctttaactaatatagtaaattacattatacacatttatatatataattgtgtggaatgaataattttacgggaggtgtaaaacaaaaaatcgtaagttaatatacaataattagctggataaagatattttttagttgtttttggcgggaatgcctgcctcggggaagacaaccatttcatacaaacttgaagagatgttcggattcaagcacatctctgcaggcgaatgcctgagggaggaaatggaagattccaactcacaatactcatccctcatcagatcttacattgatagaggtattttacactttatcttactttattctactcttaaacaagtttttacctaattctcttttcatttactttaattcctttgaaaaattaattataatcaaaatttttcaaaataattcctaaaattaccagaattttaaaattcctcaaatgtgtacctctattgagttgtaggtgatattgttcctggccatataaccctttctttaatgaaaaagaagataaactcatttggttgggggaaaacagtcgttacaattgatgggtttccccgtaatcttgacaatgttcagtgctgggttaaggagatgtctgatatcgtagaggttattaacctcatttgtctcgtttgttccgaggataccataaaggatcggctcaaacttaggactactgagatgggtactctacattatcccagtagttcctattttcctttatcctcacttattatttctaattagtttttacattactcatatatatagttgattcaatattttattgagttttagagagatcagatgacaatttaagtgtgttggctaacaggttgaaagtgtttcatgatcagactgagcctgtcgttttatgtttcactgcagcttcaaagtgtttaacgataaatgcagatgtgtcaagggaggagctctgggacaaagttgaccagtatgtacaatctctaggctataaacatgtaaaatagtgcataaaatcgcttattaatattattcaaatatttaatatctggtacttttaagggtatagttaattaaaatctctttttatagtcaaaaataatttactgatggtattttccaaattaattttcctgaagtattcagtgggaaggccagtactgaagactacgattacactgtggatcataatagaaatattaagattttcaccgccaagggtaattcaatgttttaccagattattaagaccagtggtaattgttgtggaagtgcgtgttgtggttcagagactgttatttgggaaaccaaagatcataccaagtatgcctccaaggtttttactgatggtatcggtgcctgtaccagtgccagtaatgtgagtgtgtacctgatgaacggtgatatcctacacttcaataaggctgggtgtaataaaccatggctccctgcttctaacaaaatacggcttgacctaggtaagacctccagtaccattttctatgactttcaccatgatggtgagaagaggacattcactgcaaagcctggatacatgttcaaaactgtaattcttaaaagttcttggagatggacagtatgttggtccagttgttgtaaatgtggatgtctcgcagataaagttttctgggaagcacaaaaggatgatgaatgttcaaccaaagtggaagtctatggtgttgagtcaaatattaggaacattaacatattcctgaacaacaatgaggttaggcacttccataaggtgaaaaggaagtggctctcatcaactgcaattgttatggacattgggattaatcaggataataatttatttgaatacagatctacgagaggatttggccactttaatcctagagccaatttgtcaatcactaacattgtcaagaaagagcttaagatatggtctgcgaaagatagggactatggtctgaaggtagtgttaatgggtgctggtaaggatgagaaacatatatccattctactccagagtggtggatttgtacttcttcagaagactggagtgggtaaaccatggcaagatataactcagaataaacataacttctcaggggtaaagttgtactccctggaggagggtacatcccaatacactgagttgactaggaatgattatgatccagtagtctttgagtctagattcggctatgagtttaatgatggtgtcagatgtgtgagggtcactcttatggatgtgcttgtgtggactcacactgatgatactgagtttggctatcccaagggcctatatctggatctgcttaaaaaccggttcatggtcacaagtcccaaagatcagacaagggaactggatgtcaagatagatgtttctaaggctaaggtggctccagtaaaagttacaccagtagtaacacctgaaatcaaacaagttatcactccagcagtcactgctcctcccacacccgtggctctggatattgagaagaaacaaacaaccaccgagtatgaccataaggatgataatggagtcgttacatacactcccaagagtggttatctgtttagtaaggtatcagaaggccagcatgaaatttggaaatctgctgctaatgcttttggtaagctggttaggactaaggaaaccaggggtattaattaccttgtagtcctactcaccagtaggacattcagtttgttccaagagtctgataaagagtggaaggatatcaccaaagataggcactatgttacgaagctaaaattctacggcgaaggtgacgccgtgctgaaggagacagactacgatgtaactattgtcgacatgtcatttagtcacacattcaaaagtggtgtaaaatgtgttaaggttaagctgggtcaagaggttgtctggagccatacagacgatccaaagtttaaagagataacagtattttcactgggtcttgcttcaaactgtttcttcattaagaacccgcctggtgaagtcaagatctaacattaatcaaactaagatgacaatattacttttataatttttatgtatttatggcgagattttctaaccagtatacttttggggtatttttggatttaaaaataaaaattgactggtcagttgtgattgagttgaggaatggcgtggtttattgagtaaaaatttaggtcgtgggttcgaatccattcccgatcagaaccccggccacttatttattatgcgttatttaaacaaataaataataatttaaaaaatatataaaaaatgtgataaattaggtttgaaataatttgttaggcagctcatcctgcaaagccttgaggtgtaagtggtatgctttggaaacgccaattgcatccagttgagtacggaaagaaattgcaagcttctccaaatcctgtgcgatatctcctaacgaattatcgtataaaatcttcaaagagtcacttaacgtgggaatgccgctatccttactcaagtgctctataggtttcaaattctcttgagaatcctcagtgttttgtaaaatcggcaaattattctcggtagtaacagtattatcagctgtggaattggtgtaggtagagatattggtagtgttgagcttattgaaagattcatcctcgctaaggtacactgaattttctgaggacacacatgatttcatggcctcgtctaactcactcaaatcactggatttatcggccaaatctccattgttaccaagcttgttaactacttggttagtgaccatcggcaaatcgtggtacataatttctgaattagtcagttccaagtcttcgataaaattcgactcaaaattacatagtaaagaagcctcaacgatggctaaccagtcacagtcgttactgttcttgttaggatcattagtcaagttgtctatattagtagaataagctgcgtttatcagttctactcttctgcgattaactcctccaaaccctacacaacagtgtaagatcaaatgaagtaggattaaaggtgtaaaatacgttaaataaatacagtacacataaatatttgtataatgtgtaacctgggatgagttctattaggtgccatttctctgtcaaacttgcgtttccgtactttatcaccttcataatatcagcaatatcagtcattgtcaccaagtaatctaataaagagttaatcaaaggagaatgtgtgtaataagcaactagttggtgtaaaactgggtaaaaataccttcaaattgttttaaacggtaaagaatgaatctaaaaattgcaatccagccttctgaaaagaagcaatcccacaacagtccctgaaattaaccagttaattatgcatttaactaattaacagtaataactaaataattaatgttaattaaaattaaactagtaaactcagtacaagagctttgataggtatagaattagcgcacaatgtcatgaaccagtcagatgctatcattggtatatgtactccaactgctttctaaaaacaaaattaaaccactcaactacaaaatagatataatgtaggtaaaataaatagtgtaaatgaagtgtttagtaccagatggtcgtgtaatttgggtatatattttatcatacaatgttcgagtatttcacacctcttaaatacgccaggcagtccctaaacaacacattagaattaaaattattacataaacaatatgagataagaaataattaaatttaaagtgggaataaacgatatgatttggtaccggcaaaaacatgcatcttaagtcatataaatacatcattgatataagtgcccaaaatgcttgttcttcactggaatgccacaacaaatttgcaactataaaattcaaaccctgaacgtatcccacttcagtatcaaaaaaagcatatgccagtagtatacgtctcatcatgctccgtctatataaaatattataagattttataaatattcatatttataaggtgaaaataaagtaaaaatacccgtaacgagtaaaaaatctcaatgatggatatgtgcgcttaatgtccaactcaattgccaatgtaatcctcttccctagtactagctcagataccgtggtttccttagaattaacaacgactttggcacctaatagctgaattaaattccagtaaaccccttgttgtttcagaatcgctgattggcagcacttaagccaccactgattaaatcttgagcaccgctcacctttaacctgcttcggaagctttttaaagttgggattgtccttaatagcctgctcaacattgaaggtgattggatttgctgaaagtcgacggcagtcacactgtggaagagcaagagttaagccgtagctcaaattattgtttagaatccgacgagaaccaaagccgaaaacgtcaaaccaggaagtgtcatcctgagattggacccttttaaacggaaataaacccctgcgacggcggtcaggattctgaggtcgtgaggaaccaggcggagttaattcgtcacagttctgaattatttcaacatctttcccgctcattatattattatattaaaataaaaataagtaggagaattgagtgaattgaggaaattttaatattatactacattattcattaaatcattaaaaattgatattttaaattaaaatttaccaaaatgaatttaaaaattttttaatcaaatctgaaataaatctgaaaataggaatttagctaaaaattaagaaaatcattttaacaattgtgtatgatggtgtttgaactggaacaattaatataaacatgtgttcacgtaaaccaaaataaataatttatgaaaactaattaattttttaatattttactaatagtatgacattaacacactatggcgttttggatactattaaggagaagttggacagactttctaagtttgaccatgatttcctagatctcgaccagaactctagccttctttcaacttttaatgatattttcaatttaacttctgaattcatcaagaacacttcaaaagaagattcattggttaatgaattcgttaattatcgcagcgatgtgttgaatcagtataacaataaattacaaaactcaattaatttaactaatggtacgttttttctttgaattttctttaaaatttactcaatattaaatatttacaattatttagatatttattgattttaataacttattttagagttggagaaacaaaaagatcatgaagagcaggcaaatagaagtgctaaagagcgacttaaatccaaacaacttaatttttcaggtaatttttagtgtttttattcatttttaaatatttaactactctttatctaacctttttcccactttattcacatgtttagcgtctttatatacataatgtgtagatggcgaattccgtatattaatgagtcgccaggaaatcgtagataaattaaacgagtggaaacatatttgtgacctagaacaaatcgaaattaaaaaattaaaatgccaaattgatattctagaggataaaatctcaaccaataagttcaattcaaaccaaatttcttactacaacaagttaccaaatacacatctattcatttacattcatatacaactcacatatacacacataatcaaatatatacacctctaacaatgtttgtttaggttatactatgagctattaacgagtgcactgaaaatatcaattttgaacgttgatgagaagagtaatgtgaacttggcaattttatcagagtctaagaaggaaaatgagcagacttggcataggttttcatcttctaaagactgtgatgtttctacttgcgactttttatggaacttaattgagaagtcactctgtaacaatggtattagcagtagtttcaaggaccctaacactcccaaactcaactcaatacatctgatttcaagaaactgtaactaaacatgtaatgtaaactattaatatattttaaaggataaaaactactaatatattttaaaggattaaaaactagttatttttaaaagaagttaatgatagtgggaggatttgatttcctaattggagaacactttgtgatatgatttctgtggtcgtccccttttccaaatggtcgaccttggccttaaggtataaattctcctcctttaatctagagtgtacattaaatgactccttaatcatctccaccttccgctcaagctgacgaatatgttctctcatcttcgcttgattttccagagataccttcaattcggagctcttgtcattggatattaacttagtttctaattttaatacattttttttatacatttctatttcttggttcttcttcgataacatttctctcatctttgatatctaaaccaatgtttaaaatgagtatgattggttattttatacagtgttaactataatttagctttaaatagtaaatgttacaaaaatgaaattcactggtagagagttctaaataactaagtagtggagtggatgggtataaaaaacactataaaacatacggagttgactagttgtgtaaactcaacttgtgcagttttaagaagctgtttacacttttcaatttcattgtccttttcatcaacaagtgccatgagttcctccttctccttaagaacgttggatagttgaccctggtactccatgtcaaggtttagtctaagttgcacttccctctgcctaaacttcttctccatagcttcaattgagctcttgagcatttgcttgtcgagttcaagcgactttaagtcgcggtcaaacttgctggagaccaattcattctccattatgcgttcacgcaatactttcaactcatcatccttcattctatgttcttcttccatctatacaattgtgttattaaggttaacataaatagggaaaagtgataatatagttttatgataaaagttgttaaattctcctttatatgaatataaatagataaatgactgggtattatagttaaggagcgtataagtattaccttcatcaaacgttgtaccagggtttcattttcctttgttaaaagttggagtttagcaaagtttaattcaatgacagaatcattttctgccttatactgaattactgaggcctgtttactaggttcaagctccgatttccacgcattgtactcgtgaaccttgtcagacagttttgatatctccttgtctttcaagtttaactgttccttaagaacatttattattctgcacatcttctcgagttcaaatttataaaattcttcagttacattttcacaatttgataaattactcatggaactccccagttctaattcgggatttggtgatttagggctaaaatctgttggtttaggttcaaaaacatctcttttagtatttaacaagtagtcatcaattgcatgttctaagtttggaacaaagacttcgtcaacattactagggtcggaactattttgcaaaaaatggtccatattaaacttgtcatctagatcataattgaagcgtgttctggtagtaaatttgacattattttcgatattttccataagttccattatttctacattattatttaattcttcgattatttcgttctctacgctatttaaatcatttttcaattcagattttaaatcagtctttggtacagaatccatcacatagtcggtaccagtttctaaagtattatttgtactgttttctaaactctgctcaacattgttttcaaaacttttgtttaaatcactattataaatagatttatcaacaatttgttgattaacggccgtattgtcccaagattcagtaaaatcgcagcttgtagctttatttttattaaagttagatgaagaagtatccgagtaataggaatctgactgacccggcctattcaaatcgtcgttaacggaatctatttcaacttcggctctcaggataccatcatccaacttagattttttgtttattaaatccatttataaattttatttaatttttagaaatcttttaagttttaaatgatataagctttacatttcaactccccattatactgccatctcagtacacagttattataaccagaattaccttcgaaaatcctcaatttcacccacattagcataaaaattaacttaaaaatatataatttcgtataattgaatatgaatataattttaggaataaattaaacattaaggggtcaaagttcccctttctttagggtaatttacattcattagacaatcgcaaaactacagaattataagaactagtttaatatagtataaattataataataattatttaagcagataaagactctggagataatttttttctaaatatataattaaactccggggaataacccggaacaaatatttggtatccatacctctgagaaatctatcacaccatcgcgatttaaatcagtggacataaaaatttcatctgagttaacggttccaaagtaagggccgataacctgctggaaactctccaaatccaccactcctctaccgtacacgtccaactttttaaataccaacgataacatggtaatgtctagggttccgtaatactctatcactgcggaaacaaactctgtataatttagctccggagtgtttctgaaccctatgagtctgaatattattgtacaatcttcctccgaaagagataactgtgtcgacatcacattgtagaattcactgaacgaaatggtccctgatttcgatgtatttatggagaaaaaagaccgatatacctcctttggacagttacgatctgattctagtacgcttagtgctattacagcacggtgcagaggggtttctccactatatctcactatttgatgtaacaactcttttggcactgtatagttagaatatttattatactcatttgatagccattgatgttgcaaggcttctctggctgacggacgctcgtttccgttacgattaagcaaaaatctgataaactcctttgccaactcggagactgagttccacctaacaccctcaaacttcaaattccccttcttaatcttccataaaatctctttatcacttcctgaattgaagggcggtgatcctgataacatcatgtatactatcacaccagttgaccagatatcacacttttcgttataacatccatcaatcacttcggggtcaacgtagtatacagtgccgtgcattccacccattggaattcccttttcaaagactcttgcgaacccaaagtctatcatcttcaacaatgagtcgatttcctggttcgagaagacccagttttccaactttaagtcacggtggcatataccgttagagtgtaagtagttaagcgtaagtagcatttggaaggtcatttttatagcgtaagattcactaaaccttttatatgtatctagtctatcgtacagttcgttaccggaacaatattccataacaatgtgacaaagtgtgttatcatcgtaggcttcgtgcataaatgcgatatttgggtggtccagctgtgtgaatatactaagttcgttaaatacactggtcatcttcctcttagaattggctagtgtgctaagcgactttagggcatacaccttctgtgtacgcttattaacacaatgatttactgaaccacaaattccatatcctatggcgtttgtacctattgtatacacatttgtgagcttgtttgtatagatgatacggcttctccatacatctttagttaatactatatcacttattttagggtagttgtatactttgcggaacactcctttattattcggtgggccaactccgttagggaggctatttaagttactagtgctggatgtatttaaggggtgggttaagtagagtgtaaaaatccctttggaaggatacgataggtttttatagaaaatatcagaaatatcggggacgatatattccgagtcattgccgataaaatttctgctaaccagggagtttggctcctcagtgtttatattgtttttatttcttttgataacgttatttgggatttggtgaccatcaaattctgttgagtcgatgcgacggcaacagttacccatgttaaatacctagattttaaagattctaaatttagatgcatactccattaatataatcatcggtacatttgctttattttcaccaaaatttaataattttaaaataaaataaaaattttctaaaaaattaaaaaataatataaaaatacaaaataatgttttaattttatttttttaacctctttcacccaatttactcaaattttttacctttttttagatttatttttccttttataattttaattagagtttaataaattaatttaagttaatgaatgaaaagttattgaaccggaagctctacaagaggaacaaaaattatgaattggtcgacagcctaccctttgtcgataccgttcccgtggaccttgatcctaaagttaaggagcttatcgcagatgaaatgaagtcaattttagatgagaataattgccaggaagcagaacttctagccaactacttatcggacttttcttacgaagttggtgaaaatccaaatatttcaaatggttccaaatatttttagttattttgtatcttatttagtttttaatattatttatttcagccacctgtaaaaaaatttttttaggttgtgatggtatggactttactaagtatgatggtttgggggataataaggatttaaaggctaaaatgagccacttgaaaatgttaatggaatactctcaggattccttaataaatcttgaactcatggatcgatataaagagtcttgttggcttaattatctcgattcactgacacttcttaagcttaggtttgttccttatctagtatctttatttcaacttgatagtactagttaatggatttttacacattccaataaaaacatagtaaattttcatatattatccattaggttggagaaggaaaagaataaaatggatggaatgttggaagaagtgaacaagaggcgtaaactatcacaaattgaaactgcaaacaaactcagatcactatatcaagatactcaagattataatcgcaagtattactctactataaattcatcgatttaaactcttaaatcgaaattgtatagctaaatacaccaacatgtgtatgcgaataattagattaaaatgtgtataggaacactgaactgttaattgcaattgaacacttacaaaagaataaagttgtcaattacgacgacccgtgaaatagagttctaatcccttcactacctatacatattatttattaccacactatatggtatttatcaactatatatataatcttgtataaataaatatcaaaatcttaaagttggaaataataatctagtgtaagacttactttgtgatataaaagccttaatttttgtggtactgcaggatgattcaaataattcgataaagtcactaaagaaattattaatatgaaaagcgtattaactacaagtgtttaataatattttaactatttgtaactagttatcagtattatagcagtactatgtaaagtcttaaagttattgagtagataaacatcgttcgcgtggactttgagccttaggaaggagaagtaaaggaatagagggaccatgttggtccttccggagaacaggttaagcgctaaatagggcaccaaagcgcattcgacataagatctgaatttatacacataatatttatggtgttccactttcattaagaattctttgactttatttgtcctaaataattattgatacagtattatgttaaataaggttgagagtgaatcagtaggaccagtacctcatgagggatgggaatactgatgggaaagccttgtacattgcagatagtgacagaaatgcggtagtgagttggggtagagtgtatgcaaacttgattggatattgcaagaagaagaagccgtacattaagtagtggactctggtatcgttggaaagcgctgaaaaccaagcggaattaaagcgaggtcttcccttttcacgcagtattccaaccaacaaatataatattgaaaatgacttcgatacagtttcacagttctaaaacacaaattaaactgagaaaaatgtatagatatgactagaaataggtttatctgttagtaaataacagaaatgtttaactaagaatactaatcagcaacgaataggtaaattcatactttgacgaggttatcagagcctggtgttttgaaccttgatgtcagtaccacagcagtggcaaagacatagccaagcaaaagaacaagttcaagccttaaaaggagttcttgaagtaaaggcatgtttggcctactcttaagtcggtcaaataatcccactttgggccctaaattagttattaaaatgttaataattgaacaagcgtacatttagcatctttggcaggtgatgcttgtggtttagatgaatcagttttggatttgctatcatcattagcaacattaccgacagtagaatcaacactcaatgaagagtcctaagcaaagaattaatattttaaagtttgaataacattttataataattatttaacgattaaaaaacatagagaaaaaataaaaaataagctgaaataaccaatagattgtgtaaaaacttacgacattccttctgaaccacgtgcgtttgaatttcgggactttagaagcatcaggggtgggatataaatttgagaaataggtctgccaatcctgagatttggaccaatcgaaggctaaacaaggaattaataagacaattttgataaatcaaagagtaaattttataaaataaattagagtaaaaataaatagcattaaagtaggtaaaaacctagaaattttttttcggcttcagataaattctgatcagacatagtgaaatgacaaggggttaactatttcgtactaatgaacaatcaggcaattaacgaataatattatctggttaagttaacagtttattattaattgatcgaaataataatgattcgatgttctatatatggggaatcaacattatgataaatatattattatttatccaatttattatatttttatgtatttttatgaacatttgacgttttatttgtttatatgatacgacgcaaatttgaatgtgttttgcattaaatatttaaatcacaattataccttgcatgaaaattcttctacggctatttaacaaataaatttgacagatataattgtagtgaactaattataattgatattaaattaaaaaattgcgttttaaaaaattatctagtattaactctatctaggcattcccagtataatatcgaatttcctcgaaccactacaactcccagatccacttggtcctccccaacaacttcgagagcgttatcgagcacgatgttcataaatgtgtcatatccccttagaactccgacaacgtgtcgcgatccgtttaaatgaactattttacaacattttattattattttataaaattgagttatataagtgtattttctgttataattaatagaatccatagatagcttattgtaagataagggaatgtaaacaaataatagagctataaactggtaaaattaaacaaatcaaattaaataataaaaagtaaggtaaaaatattataaaaataccatcgagtcttttttccataaatctacgtaaatccgcgtttccagaaggtttggaatctccagccatttttgctattagtttatcccaattattatattgataattatattacttttatttaatgtattaatattattatatttattactgaaaaaatattaaaaaatacactgtggaaatatactattaataacaaatgctaattatagtgtaaacaaaaatatactaaatgaataaatcatcatatctttttgttgtgttatataatttaatatcataccaatagagtatgttatgtaacacatatcatagaaaaattattatgattgtacaactaattttatcaaatgctccataaacgtcttgagactaacgtcatcagtgttgatgatggctgttgaaccgtcaaactcctgtaagcctgaagtgtacgtagtgctaggattaacctttgcaagcaaaaacctagcctgactaccaccctgattgcataaaatgaacttgggagttgggaaacgctcatctaaaatgtgcctggcatcgtctgaaggtgcctgcaacagttgcttaaaatgtgcgtaatttgtatcatcttgaaatccctgctcacgccattggtgtattgtttctccgtaccaaatgaccagttggaagaaggtgtccaacaagagtattacgttcttcttcagagaaactgcatctagcaacacaggctgaggagtttcactttcaaatgaatattccaaaagtgcgggttgaatcattattagcgagtttatgacgttttctctacacaaaatagtgcgatagaaagctgtttcatcgggtgaagcgttgaaagtttgcaaaaagtgtgaccttctcaggtgatacatgaactgagggtaaattgagaattgacttgataaacggaacgagttgacgtcattcttctggaaatctgcaaaccgtcctacgaggctaattaacttcttatcaagccagcgtaacacattgagcgggtcctcagtgctaatcttatacaaggcgtagcgtgccattaatactgcagccgcttcctgatcaaaagcattcgataagtctgcgaggtttggttgtccgtatttacaagaaaatgaagtaactcttagcctttttgtcccgtctgggtggaaatatacagtttgaaactgaacaaatgactggcgtccagacaatgcattagcgtctttatttggactacttgtgttcttcatactaactgcaccaacgtttaagccaactgcgttcatcgcatttgtcaacacactactgtttccgctgtcaatatcgaagaaaactgccaaagttgattgtctgtccataacacccaggttccactcattcgtgcttccctctccaattacgttttctgagacatttgacgcctttttcttcagagaatgacaccctcctacgatcccacaaaccttcaactcgggagaagtaaatacagtcaaacgagcattgtatcctcctaccatgttaccttcactgtctctcttgaatactgattttagcgagtctttaaatacactcatactgaacgagtctgacatgaccataactcctcctgtcttatcacaacacactttcatctcatataggcctgactgatcaagagaacatgcgaaaatgtcaattccgtggccatttccagctgccaagttagccagtccagtgtagtacttctgtgcatcctttacgagtctagcattatggctctccttttgaaggtctaaatgatgcctaattgactctgaaagactagtttccactatctttcctggcccatgtgtacatgctccaccaagaaacatcataactctacctcccttcccttgtgcgaaacactccaacaaactcaaacctacactcaaggcactgcctgtgcatctgttcggcctgctgttggtaggtactggccatgaatctggtatcagtttttccaacaaatcattgattgcatactcgcaagcgctaaggggctgaacgaacctgttgttctgggctatgttcaacactcgcttaacatattctgctgtatgctctgatcctcccctaagtacaaaacaccttggcacgtcagcatcagttaggtcatgtacctttatcacagatccgaaggttacaaatccaacattaaattcgcccggcaacatactcaatacctatatcaaattataccaatatatatactatagtagttgtactacataattagtatataaaacatgataattatgatataaagttacctgttgaagtgaatctttaagttgatcaagctcctcttttgcaatacatacatcaactagaaagataaaagttggtggaaaacaaccacctgttacgttcggtggtataatgtactccatggttagattggtgagttccatgggtaggttttgaggggtgatattctctgcgtaaaactgggggaagggactatcaattttagtaattgggcacatccacttcttggtgttaaaatctatgttacagtacggattaaggaaaattccactgttcttgtgccttattgggatatactcaaccagaggaaccttctgtgactcttcatctggctgtttcaagggggtgaagagacagccgaccggcacctcggccttctcggcgtcctcgtgagaacatggccataccacccagctaaacctcaaacctgtagtagactctagatctgcaaagtccatctcctacacaccgtcctatttattacatccaacaaattctagaattcggttaaatacaaaactatatcaccctatccagatcaatcaatttaaaatgagttaaggaaacattaaaattaacaaataaacgagaataatttataaaataagccaaagtatgttaacaaatgaaatgaaacaatttgtagaagaaaagttcgattaaaaggtctatgggtaaaaaaagtaataaagataattttaaaatctttgtggtggatatattcaggcgaaacttaaattactcaaaataatacaccttcccaaacccacagaaaataataaaacatgtgaattttgtgaaaatattaatttatattctttacacaaccccacgtatcatgttttcatcaagtgtgtacaattttcaactataaactccttatattgtttttatttttattttaataataatttactttatatttacattcgacgctgtaatatgattgtgtgattctaccacacattataacttttttatatattttgatgttatatttttatttttcatatacatcctcttataactacccatttgtataaattacaattttatttattatttacaatcattatctactgttatactttatgattcctacttgatttataatacttgattactatatagtgtgtttaaaatattaaactacaatctgtacaataaaattgcaaataatggtacagagatattatcttcttctcttgataaatactacacatacattatggccataattacacaactaattaaatgtgcgatgagatacctcgaaaacagaggagaaaagtgaaacatagaataattttttaaaattatccaggaacccctatgataaaatcgtttaagtttatattttaaagtcatacgtgttggaagatagatgttaaaatcaaagaaaatagacatgagaggaagaaggatacaagtccttggaacgatttgttattgtaccgattacccctatacttagaacccaccaccgatgcctatgtatattatatattagtagagaactatgtgtttaactgtatagaaattagaaaatagagtgaaaataccatagagtccccaatgccaattgtggctacgcctagagaagctcgagtccaatcaaatttatcgcttttgagttcaaacaatataggtatcagtattctaaaaagattattatataatagagttaaaatacccagacaacattgttattgtagatacttcaaacttttgtacctcatcatcatgtccgatactaaatcttataaatcgtcgtgttgctagatagctagagctatactatagaaataatataaaaagtacgatttgtatatatttgtgaagaattcagcgataggatcaaatagtaagttattaattcttagtagttcaataaacacaaaaagaaccacaagtaaggaaaaaactaatgccaaaaaaatctcctacaagtaaattaacccattaaacaattaatttaatttaaatatgtaaaaaataccaggtggaggaaaaaggaatagtaacaaaagagtacaattaaaaggtgaaaccattttctgacattagtcttcgatctgtatagattagttgaatactttaaattaaggcctattgccatgaatattatcacggttgtaagaatacaaaagagtataaatatgatacagttatactccaggatatacgataacaatactttaaaatttgtcattcctataacagaattacattgttgaaagttaccattatctttatataaaacaagaaaatgaagcaatttaaatacagaatgtaaaagaactagaaaacaaaaggaggcattcattatcctaaatttatccccctgttccattgatagtagatatgctatcacaaatatactcagtagaaataatacctacaaaacagtttatactggtgaataacgaataactaatacaagtaaatatctaagttttacaatgtgataaaaaagatttatgaaaagtgcttcgatgttgttactgaagacgacatttcgagtgaaaacgtggaatttgttaaagtcgagaattgaattgaatttattaaagacaattgaggttaaaaatacaatggcttgagaaaacaatacatataaagagaagatatacctaaaatacacatacattagtattatgtataggcgttaatgtaataactagtatgatagtatggaagaaccttttctgggtgagttgaatgactagatatgttacacattgggctaaaatgaggaaaaacaacccgaaattaggtattgaaatgaacagccttaggacggtgaaaaaagacagtacagtaaaaataggtgaattcagctttgaaatattcagccggatccagaaacaatgaaatgttgaaatcaaaataagtggtaaaaaattttgtagcataaaattatcaattgaagatagagctagaggaagtagcaaacattgaatatatggtagtagagatggctgtgtaagcttcagctctttccatttaaatcctaaaaatggcgtgaaggggtgcgaaacaatgaaatattgtgttaattataaattttacctgcaaatattgcgaaatttatcaacacaaaaaacaactgcttaaaaatgtacttgaattgatatagccttaaaaaccacatcgacacaaatttgagcataaagagctcgaagccgactctacacatataaaaataatttatctgcattttttaatcattttatctgattatttaaaaaatgtaaacttacaatttctaatgtgtaagcctttgtcccatggggagtacagtcatacctaattctagaatatattacattaaccgtagttaaagtggttgtctacttgattttaaaattgttttccttattcgaatgtagaattttattagaatatccacgaatacccattttttaaattttaattctttttctaattttacatttaatttatggaactttctttctgtaatttcactacactttaaactaaaatataaatttgtaagggaatggaaaagacaaaatcgccgcctgttgttgttccttctgatgttacaatttgtgagaatttgtactcgactggcactcgagaactaacttcaatggagaaactcggccttcttcttactccaaacccaatcagattcaattacactaaaaatgaccgatttgaactacagtctgttctatccaaaaagtactcagatgatcctgattatatcactgatatccttcttacgagacaaaagtcgattagtaaacaggtaacatttaactattattccttacacattgtcttgaaatacattctgaactttaggtttcggcgaaggtgtttagtttatttggatttttgggcactgcagtagtaactctgtactcattgaggtatcattcgataaagaccaaggtgttggtaacacctttcagttcttactttggttaccttgccggacaacaggctggtaacctttactacggtcgctggagtgagtttggccgtgaccgagccctagggaaactccctgcaaaacggttcctaactcaggaagaaatggatcaatattctaataaataagtatgtaatagagtacaaaaggtaaaaatatgtatatagtgtgtatatgtaaatctagagaatattgaagtaagtttcagttgtgtattgttttaagcccgctctggagcattatacgatatatagaaattatagagaaattttaaacaaagggaaaacatataaatacaatatccaatttaaatcaattaagcctgtggagtgactgggaatccctgaacgttacccacaggtgataacttggcggtaacttcagatgtgaagaatgcccagaggaaaacatgaggctgaagccagaaatcaacattggcggtgacagttgcaagaagggtttccaacttctgcttgtctgcagaagaagttggacttacaacctcgccagcaaatacagctgttggtgtcgaggtagccaagctgtaccaatcataggtaggagaagtacctgtaccagctggagtaaccagagccaatagatccgccaaattgtctctggctcttacgtacagataaaactctttagatgtgaatttattgggtgaaaacttccagtggttccagaagaatagtgacataacagtatagggagtatcattttgatgtagtgtgtacttgtaaacattgtatccatcgggtagatggggatttgttggagtgggcaaggtaccctctgtggcgccaggagccagggctgcctgcaccttctccatcttttccactgtgactaagtgtctcggagagtagaatgtgctcttgacggagaagtccaagttgagagtcgagggtgtaaactctccgcgtctcaagttttcgcgggcgacaaatctaacaacgtctgcaacctctgaggccgtaagcctcatcttcgtcttgaaaaaaagctcaaatttgttcccagataagtatttgaagtagaaattttccagtctgttggcttcgttacggtgagataactcaagaactagtgggaaaaaactatattctttgggtgaaccttccttaagagggcgcaaaaatttatagtgaaaggctgatacgtgtaatacatttttaaatggtaagttgaacccttggaatactgtgtctccgaagaaaaccttttctagtgtgaatgctggaacagtggatggcatgggaacttgctcagcaccttcggctggtgcctgagttaagagtccgggagtgaatgaaacgaatttcacatcaaaggcatccaacgattcaacgttaaccatcatgttacccctcttgtaattcttagtggcatcgagattgacaacatacgagtgctcgaattgtgcattaaccgtattcaaccgttgttgcattgcatctacaaatctcgtaaaggtctcatcagtggtccaagcaaagtcagtgtgttccaaattgtacatcatggaggaaaagttgaccatagaatcgtcgagtgcaaacttatctcctttgagcgataatacaacgtatctgtgctgaaccacgttgcctgttgtaactggtttgtaggcaagcagcatcaagggagttccatcggcatttagaagggctgaaaccgaatttactgtgcccaaaagagcgtcagaagcctctttctccattgaaagtctatgaccattaaatgatacagcctgtagattgaactggggtagtggatcagattgtttgtttgcatcagttgaagcccttggggccatttgatgtacaaaccacttaaagttgagaggtgggaagaattttacactctcgtcatagtctgataagtcaacaacatttggttttgttggagcatcagacccctgtagcttcgattgatctctcgttaacttatagcctgaagagtataacaccctggtggcaaagaaggtctgagtgtttagggcgtaagtggtccttcttctagctgacatatttgcaaaatccacgttaacatccaaggcatgtaactgtttaagctccaaaagtttatgtcttagagatcctttcgcttctggtacaaatggtttccaggtatgatccaaatcgagaacaaaaaagtgtcctggatatgaaaagggtgctggttcgcgaggtggagggggcgattgttcagtatcaggggctgatcttgaatcaggacctgatgcgggagttgccgaagtaacaacctgggctgtttccgtcgaaaccttcggagtaacttcaaccagtccggttctcaacaacgaagaaactcgttgaaccgcgtttgtgaaggtagtagttccagcggctccagctccggcctcagttggtgcctgtacttgagaagcgggggctgcggtagttgaaggtagttcagcgttaagcaataggttagcaggtgggggtcttttcattttctcaaccacaggttcatccacatcttcagagtcagaatacttaagctgtaccataagaggaagttctgaaccattagcaaagtaggcattgaatgtgtgcaagaaatttcccacaggtaatccggctgagctcaggttctttccggctagtctcagccctccaaagccgaataaaggtgaagattctggactaccgtcatcgtcatcgtccgaaacacgaaccgacatgtcgtatagatcataacgcctgaacgcaacgtcgtacgatttctgggcctcggcaactagctctgaaagtttgttgagaacgtttttggcaccgttacaaccttctttcaaaggagttttgagtgaattgtttagttcttcttttttagcagtaacctgtttctttgcttcagaagttacattgtcagccataagatcacctttcttctccttgaaagcgagtaaaacagctttcattttttcggttctttgttcgtcagttgtctgtttattagcttcaaggactttatcattaagtgccttggaggtgtcataagcttttttcagcttatcgtcatcagcaagagtgtcgtttaccttctttgccgcatcatatgcttttccgagcttttcaaagtcctttaggtcctcttttagccttgaaacgaatgcttgcatttcaactaaagtagttttatcttcgtctgcggagagagcttttgccatttccttgacagttgatgcaacttttgcggcttcctcaagcaatttaagagcagattcagccccctttaacttttcaacctctctaagagccaattctacttttttcaaagcctctgtctttagagactcagaaaatgcctcggctgaatcggataatttttttaattttgttggatccgatgaactagatgtttgttggggatcaacggctgctttaaatgtttgatcaaaagtcttaagtttttctgcaagaggtgccaactctttaagcttggctgaaagggcctttgtagcagcgagttccattgcagctgcattatcggattcggctaaagttttctttaactcaggatcctctcccttctctacaaactctttcaatttagttgcaagagaaagagaaacttcaagcttatcaaatgcagctaaagcaagggtgaactttgcactagtggtgtcggctacgagatcggatttgaatttgttatattcgtccctaacattagaagcagattcaactacatcaagtttacccttaactgcttcctttagagtcgaaagaagggcagttgccttagcgtatttggtatgatcagtagaagtcgatgagagatccgaagcagcctccaaagctaacagagagtcaacatctggtgctaactttgccagaagagcgctggcctctttaagtttttccataccttgacatacaaacttgaatttcacagcggaatcatatgcctcagttaacttgggaccctgtagtaaagactccttcaactttttaactgcggccatcgtgctaacgaagttggcactagttactgtgtcttcgaaactggtaacagatgcaaccgttgcctttagatttgtagcaaaagtgtgagctgcatcatatttagaaccgctttcaaactttgatttaagatcaagtactaaatctttaagtgtgttcagagcagatgtcatttcggatagtttatcaccagacttaagttgagctagtttttcagctgccaaaaccaacgcaggtaatgtcgtcgcttcttcgttctttctcaaagctttggctgatgtgacggattcgtcaacaaatgttgatggttttacgtgaggctgaacagccttagcagcggttactgcctctgcgagcttagcttttacggaagttgtatcggcagacgttggttctgaaactgtgtagaatgattcggaagctgcctgtttggccgattccagttcctttttcttagcaactaattgttcttttttatcggccattgcttttcttttatcgccagtatccctggagccagttgattcagcttcttcatactcagcctctgcaagtgctacagctttctcaagagaagccactgcagcttccttttcatagaaagttttaaagagggcagccctagaccattcaagcttgagccataaatccaaaagagaatctaatctacccttggcctcaggcaatttagccgttaaggaatcaagtttcctcttcttgtcctcggcttcaaggcgatacttctctctattttttaacttttcttgatactgtttatcacgctttgccttcaatttatcccttgcatcaaatgcccttttagactgagtagtatgctttgaaaagccatcagtgaaaggagttttagagccatgaagttccttgccacaaacttcataattcgactctttggccaaatcaagcatcaacaacttattctccttgtagttgagatcgtcgagtgttttttcaaggtcagaaacctggagggcttcccatgtctgagttaaaaatgtaaatgaaaagaacttctcggccccatcgagttggactagtttaagaaccaaaggcttgtacgaagatgagaagagtgtggcggagaggaagtttcgatcagccaagcccaagtcaaactctcttcccaaaaacataaccctcctcactgaaaagggtgcgttgtcagagaatttatgggttgttacattatagccatggaacatatcgtcacgtctgttaacaaacacagttttgccgtacgaagagtagctgtaggagagtttgtcgttttccacatacaatagtgggttcaggacgtgtgttttgaccatttgttctgcagggggagctggagttcttgcgactgtaaccgcagcttgaggtgattgtgcatcagaagacaaagcagtagagagattggcgtcaccaacactgtcgggagcgtcaacacgagatggggctctaggtgccaccgcctcttctggttcctcttctggaacggctactgcgccttcaaaatccttaactttcccctcagaaagaacatattcgcgggtgaaattggcattcaaatggagtgaaaccttgttggcggtgttcctggccacatcagcgtgctcatcgtaaacgctgtcgagtgcgcttttcaggtctcctgaaggaagtcttgcttcaaaccactggccattggcattagatgagaagaatttgtaccttcctccaaccttaagttccaacatcaaaggtttattgagtgagaagtagactgcaacttggcttgctttcataacaggtaagttctgcattaccacgcctttgttaacaaacttcgacactgtgaaatttgtgttatcatgggccttgtgaaggtatttagtgtatcctcgtactcctgggaatgagaactttgtcacattcatgcgagtcaaaccgtaataggttccttcattcttcgacacatcaaccacggtaactttgcccaacttggcacttaaagtatttagtttgtcataaaattcttggtttgttaatcttcttccgcctgtttcaagttttacccattttccatactggctcaaatggtaatagaacaaaacgagcttactggaagtgcgaacgtgtagttccaagaaaaagggtgaaaagtgtcccacaggtgtgaatacatacacactgtacacattgtcctctggaagtggaaagtttcctgtgctgaaatcagtcccgtggtacaataatctgttgagttttacaccttttaattcgtccaaaacgtacaaattatacctagagacgcctttgggaactgatgtgtcaaccacatgtaaggctggtaacaacttaacacggtcggacttattgcccaatgttctctctgcaacgtccaagaagtactcgtccttaaagtgagcagcgagttgcatgagcaatgctgaggcctgtgtggctacattatcaccgctgtacgtgccgacagtcaactcggcatctggtgcacttccgagtaaaactaaatcgtccttgtggtcattcttaaagtacttgacagtatcttgagaagagtcgcctacaccagcttctgtcaacttaaccaacaataaggaattcttataccagaacgaatctaccctcttaacataggtggctgtgggatatgcccttacaaccctatcagacatcttcaacaaaagcatcctagcattagtgttgttgagagcgtgagatactttgtggaatccgttccagtttttaggagctgtgactgggtcctttgtaacaaccactgcagatgaatccttaccataattttctctcctttccaatgacactgaaactctgttagcaaaaggtgctttaacctccttcagtagacgtagaagaacggattctggtagtctttcattgttattatcggttggatgaacaacccatgatccttctgaagaatacttgaagtacttatacttgtttttaaagccagaattgttcaactttgtccattcaagctccaaaacaagtgggagtaagtcaccatctgtgaaaactgtggcactccttacaaatccgtcatggaggttagtgagtactatgtcgccccaaagctctaacttattaactctaaacacattctcgtggttagtggctgagaagtgagtaaagcccctgaaaccttcgtctagtgagtgtgatgggacaacgcgaagggtaagtccttctgacacgtacttgacatatgagtcaaacgaactgctcttgtcaaggtcaagttcaactggcttaacgaaagtgtccttgagttcttcgagcattgatgccacagtggctcttgacaaaggaagatcagacttggtggccaaagcccacttatctcccttcttcatgtagtacttgttatttacaccgttgtacaagtgcacgaaagcgggttcatggtcaagccaccagtagacgttgaccttgaaaacagtgtcaactccgaatccactcattggggtgtctcctaaagtgaattttccaaccactggcaaggctgcgctcatcacattaactcctctcagggcgtttgccttcaatgtctggtaggtgttcaaaacacgctcgactgcaggcacgaccctggtgctgtctggttgaagggctgattgctctggtagtaataccgcagctggagcaccttctggagtctgaacaacagagtcagggagtgttgatggtacagctccgcgacccaagcttcttgaagttgccactctggcctcttgttgctcctgttggggtgaacggtcagcggaatcggatgacggctctagtactgtggttgcgttgagatttgcagcagttggaggtgacacattctcagcattacctgttttcacaagagagtaaacatggctatagagcgagaacccccaggtctcgcgcgtgtcttccgtaacttggacattgaggtgaaagtgctccgtcggtgaggcgagaagtttggagctgaacttcctggacaagtcaaccttaaaggtcctagccatcctgtctcttgcagtgttaagaacttctttcaagttagaggagggaagttgaccaagggaagggttttccaagagttcccagttgcccaagttgttagcgaaataatagtagtggtaggaattcatatttttcttggatgagtggagctccaaaagtaaaggtgtgttttcatgcatgtaaacgtacgcaaagtataccaattcattgaaaagggggacgtttgtcacataaccatcattcttaacgctggccagcttgaatggaactgaagttgttccgtcaaccaggtcgtgcaaatacttcttatatccttcaaaactcgtctggttttgtaaaacgacgttcacagtaaactcgtggtatgggtatgaagtctctttggtgagttccagagatagttgatcagcaacccttgatttcagatccttcaatacctttgccaatgactcctcgtcgaagcggtcgaacgtaactggggtgtatccgccttcaaaatctgacttgtaaaacaaatcagtcctgtcgtaagtcactacgtggaagaaaaggtagtttttcctgaatgtgtagacggttagtgaaaacaggtggttaactgttagaggaagattcacttgagagccagaaagcaacaagttgctgagcaagaacgggtattccatgccctcaggcttgtatgtgtacttcatatatcctggaaccagatcaaattcaacaaagtcgacgttgaaaagtttattaccaaggtcttccgcaagatcaagcgagaactcattgccgagaccgtcttgaacgtactgaagcttttcccaaacgtcctcttcttgaaatgtatcaaaaacaccgtcgtctaaccacagaccgctgtcatgaacgaaatgatagtactttggactatcgtcgccagtcttcacgtgcaggtataacggtgaatcctctttatagtatactgaaaagtcggatacctttaaacctgttgagaatacaactgcatctctatcaccgtacataaatgttcgtacagtaaatgatgtttgttcctgttctgccccagtagacttgagtttgtgtaggtatttgttgaagcctgcttcttcagtctttgtaaccaaaaagtcagtttcatttaaggtgtatgcctccttctttgaaaaatctacatcaaacactgtgccgactttggtggacaaagtggtcacagcagtgttcacttgttcatcggtgaaagaagtggcacctgccggtggcattactctggtcaaagcgccgtcgccgctcattgcgaagtacttggggtcagagttggtcttgacgtacattggaagccgatccttgtagtacaccataactgtgtggaaatcgtcggagttcaaacctgtcaaaattttctggccacaagtgagtgcagaaaacttaagtgatacgttatcgggcaatttatgctggaccaacattacgccgtttgaatttggaacttcggaccttgaaaccgatactggcgtactaccttcagaggccaaatgcttcaggttatatgtaacaagctcatcattcttagctgatccgcggcaaacgtccatctttgcagtgtggctcaattggaccttttgcaacaaaaggacgtctttaagaggaacattagtcttgttgtattgataccagagtgttcctttaaacgagtttgaaaaacgcaaaggagttccctctactccatagacgtagaaatgtaatggcacttctccgtacgaatatacttccatgcgttggactaccatatgctcaggcacaaggggttggtttgctggtcttattgttttatattgttcttccgtgacatttccgagttcaacgtcaaaatcgtagtgctttaccatgcttactgggaaaggtgctgagaatgtgtgaactcgtttggtgaaagatgtcggagggtcgttgtcatatgaggctgagtcggtgactgtaacagttactgggcctgatgtaaatgttcctgaggaatggcctaggtttaaggtgacctttcccagagtggctcgagccttgttcaaggcttcctttaatttctctgctgtggttggtgcttcctctaaggcggaccaaaccttactttctgcattgtaccagtagtagaaattgaaaggttctgcctgagtagcttcaggttgagcacgagtaggcggaggagatgcagattcttctacagctgtattagatggttggtctccacgttgcgcagatgaagacgcctctgaaggaggagaaccagagcctgagcctgagcctgagccagaaggagaacctgaaccagagccagaagggggagtttgtgcaggaggtccaactggtgcggcaggttgagaagtgcccacgaccttcaacaacattggaacatcaagataccaataaacagtggcatcagtggtcccttgtaatggttcactcacgggcaatacatccttaccggcaactgtaaacttctcgaatttgaaaggtcctctgactgatggggaatgactgtatgtagtaaagccttgtaaattttcaactgccgcctttgtaacagaaacaagtttaccaccagaaaggtaactggccttcattctagcgtctaatacgtaagagtctgttagtgaaagcgctctgttgtcttcagaaagctttttcagaactgcggcggtagtggacatctggtcatccaaaacaaccttcttccataacccaaggccattgtttgagaagtatagatatgttgtcgccatgcctccggaagtggacatgctcattttaagcaaaagtggaacatcagaaaggtaataggccgaaacctcactcactcttagaactggtagacccaattggggagtcccatgggaggaaaaggagccaactaagtgggaactacctgttgagaaacggtgcgtaaactttttatatcctgccgccgaagtagctgcaggacttactctgaccaatactccattggtcgtgtaagtttggtcgcgatcagctgtcttcgataaatcaagagtgagagggtcacctagtttattctttaacataaacagcttggacctgagcttgtcaacgacttcaaatccccacttatttgtgtccacactgtatgttaaatgttcgtgcgcacccccttggagttcaaagtctgcgaccaagggtatgttaaaccaccaaaaaactgagacggataatactggctttctggtcaaaaccaggtcagacaactcagtcccagaaaccaaaaccttttttactttaaatggtttggatgcaagtgtagtggtagtatcggcgggcattgaaactcccgccaatttgtgtgttaacttaacaaaaccggtttgagaagatgagcgtcttgcaagagtgaaattaactgtcacgccatcaacctcggttttataagctccggtaggggtttcagcgtactcatcaaggcccaaggcaacaaaattgcctgcagatacatttaattcatccagtttagggcctaaaactgcgttatccaaaagtgtgttaggatcgcggtcaaatcggtcccatcgaagggcatcttggccaaaatgggctgtatagtgaaaatattttgttagcggagtatctcctgtcttttctgcagtaaaagttaaaaataaaagtgaattaaaccaccagtaggcagtaagcctagtgactgggtcttcaaagaattcgttggaattcgcgccgtcgaaaaccaacttctcacccttaaagggggtaggaaatgtgtgggtatacatcgtatatcctggataatcaggcaattcgcctgaaacaactgaaactgtgactccaccgaattgataagaattagacttagatctagcatcaaataagtaagactcgcctaggcttcccttcatcgcattaaatcgttcgtttgacaaataggtcactacgttaagaactttgggcgatggaggttctggagttgcatctgccgatttagccgatcctccctccgcaactttggtctcttttttgtaaaaaaagaagaacattgcggcagcgaagaccaaaagggccgcaacaaccaagacggccgataccaactttgttgcgttcatttaattatcttttaaataaaaaaattaaaataaaaagttaaaacgcaaaagaagataagataaaaggtcctatttatctatcagcatgtgtcattataaaaattaggaaaacacatcggtacgaaaccctaaattaaaatatacaactgatttacaaagtgtgtggaaatcagagagtaaaacattacattaaaatatacaaccaaaataaatataataaataacaacaatgtctatggggataattacatcgataaatcgtatgtgtagtcgtgcaatgggatgacaggacctcatcgtacatatgtcataagcacccatatgagccttttatatcatatttaggcttattttataaacaaatcaagaggacgttccatttatatcgatagttttatcgggtcccttacacattttttacacatcaggcataaaattgtaaatacaaccatgaaaatacacaataataggttaatgttgatatatttatagaattatgttttatagtgatgattttccatctatttacgtcgatttataaatttagtcataattatttgtcaattcataaatttaacaaaagtttacagaagaattcatcaattattttatgttaatttagtctgatttctgcattccattatttatattgttagtatcttctactaggttttttcatgcatgttcagtttctcgttgacattttttagtttgataaaataccaaaatatttataattaaaataataattattataattgtttattaatcaaaaaaaatcatatataattattgatttgtaccccgtgagtaaaggttattattaagaacacccgtttattcagtacaaaaaactttaaattaatataaacaacaaaatacaaagaaattatacttatgtgtatacaatttaattgttaaatgtattgttttgtactttggaaatggaaggcatgctgattttatgacttaacacttacaattttacccaactttttatcaaatatggacaatttttgtattatttaaacaatttcatgcatacttaccagatgtgtacgatataattctacatgtgtaattcatttgatatgaattccccataaaaattaacaattttgaaataattggcaaaacgaggaggattctttattaatatcatatgataactaagtaaaaaaatatgttgatatgattgttcaagtaatatatgttttaagcttttatttatgcctttgtcattctgatagtattgtcctagatatctctaaagatgttgattttgacagattccacatcgaaaaaaaatcgaatagtaaggtaacgacacataaatattatagcaaggatgatttcaaaatcgcaaaagttgttgacggtgaatgtgtgatatgggacggtggtgtcaaaggtgaagtgtgtgtatctgttacagagcacttgatagataattcttcattaaatttgcatattaaagttttaggtttaaacaaagaaaatagtgatttttactacgaaaaaagaggtaaaacatgggctcaaactgacctcaaaaagtcagaatcatattaccatctgaatcaatttttggaagtaaaattggtaaagtttgatttaaattcaaaacctgatagagaattgtttaaggtggaaagaacaaacaaaaacggcattataaaaagagttttgtcacccaaaattggagttaaagtaaccagtgtcgaaaacaaaaatgagaaattttgggaaaagaatgagaatacaagttttttccaaatatctatctcatacataggaaacgaagcaattttagctgaattaattctacaaaagaataaagggttagaatacaggtattttgaaaataaaaatgaacattgggttgaaataccacccaagtcatacgttgaaaaatcaaaaggaaatgatctccatttcccacattatgacataaataatttagatttaaccaagtttagtgtaaaagaatatgaagttttaggtatcaatactattgtttacacacccatcagaggtaccacaatattaaatatagtggaaggtaatattccaatatgggcaacaaagggcggaaattgtgtcgataaaatatggctttattctagaggtggaaagtacctcaccacgattttacgggtcatagattctaacgaaagacaaaggttaatcaattacaaaagacttgatggtgaatggaagttagttgtaagtgaagaattgtagaaagatgatttaaattaagttttaaactgaaaaaatacgatttaaactaatttttaccaatcttatacacttttatataaaatgtgtaagaataacttataataaaaattaaataagagtagaatttaagtatttaagcactaatatattataaacaaatgaatgtgtaaaagaaaaatattcaaaacaagatggaaactattaaatggatatactttaatgtgtaaaatatactcacagggtagaataaaagggtagtaatcctttaaattttcgatggaaattgaaaaatataatatatttcaaggttaatatatatgttatacttcaaattttgagagaacccaatgaacctaaattgtttacgcagctctacattctctgataattaaccccatagacactgttgttatttattgcatatgattttggactattttctgttttgtaatcgtaaactttgattcttattgtatttattaatagtttgtatatatatttatcaaattttataacaatgtgttaatatccgctccatgcacatttttcgattattgaatgaattctgaagagaccataatactagttcaatatcttcaattctcagtattattgtagttttttccgatgaacaaggctagcttggtttcagttttgctcgtcgttgtggcccttgtggttttggtagtcgccttgggcttcttttttactaaaaaagaaaaggccggcgctgaagaaggagaaggagccaaggaacccacatctaaggcgggtacaccagctagtgctaaagtactcaatgtcgtaacttatttgagagatgataaggttgatcagttgaagagtatggctgattcatatcttttcgatgcaagagcaaaacaagattataaatttgccgatgtaacagtatcggttgctgttgcagaagtagaaaactatcctggatatacaaaatttacgcacacatttcctaaaccttttaaacctgaacatttaatgttcgacacatttgtaaaatacgactcatttgaagacccagtttcaagtttaactgcttactggtgggctaattcactcttatttttaacttttaagacgttaaatgaagccggttcgtcagctaggtattaccatttcactggcctcctcagtgaatcccgtttgtcttggaccaagtttgcctttgatcctacaagagttttggatccagccactttgggtcccaagcttgacgaacttaatgctactttcggcaatgttgttgttatgaatttggatgaatttgttgaaggtgccagtggaacatatacgaccgaattatcaggcttcgttacgacatttaccttaacgaaggctcaatatacaagagatgagttttacaaagttacacacaaacttttgaacccagtttctgaaacttcaaagccctttaaacttaaaagagttgaggtttcagggtcagaactaagtgatgtagttctgccaaataagcctgttttatacggtgtggtttattggtggtataatatgccccttttggtggaattcgaccttaaagggggtactcgagaatacttaacatataactttgaaaccaacaattggctgaatgatactgtcacaactgttagggctaagttaaatgtattgaaagagaatctaggagttcctcttgttctggacttggggaatagaccctccagtaatgacatgacttacactacaaacgatgttcttgttagagtaactgctgccgacaattctaacaccggtttccccaagtacactcatagatttacaacaggaaaatcccattttgttggttcttttttgaatgccggggcacctcaaatgggtttgcctgtcgtcagacttaatgaactttcagtttatttctctgatgacgttcctcttcttttagagatgaacttaactctttctggtggttctggtaataaatttgtctattatactacaaatggatttggcttttggaccaaggctctcctaggccctgaacttaaaactccggccgcgctacttaagaaattggttgccgataacaagaaacttgttgctgataatgataaatatgttgttgatgtttcctcgaagaataattatctatctgttggcaaattgttaactgtcacaaaagccgattctacaaattttcaaggttatgaggtttttgtccacaaagctaaaaataacgctccttttaagtttgagaaattatctgtagctgggaaagatgttaaatctgagggcgttgacttacaagaaggcgcatcagctgctaccgtttactggttcctgaattatcctcttgttcttaaactcgaaggtagcgcacctggagctcctaagccacagaatgctccttcaaccgatgctggacagcagcctcagggttcacaacaacctccccagcaggctgttcaacaacctgttcagagtctccaacaaaaggttgcatttgccaattattatgcttataatggtgagactggactgtggaagaagactgcattggattctaacgccggttctgatacaaatgcagctttaaataagatgttggagacctcaaaagcttctcttggttccgtaactcttgatgtgggacattcagtgggcacttataaatccgggcctgttactgttgtggtaacttctgaaccacttgatacaagaaggcaaactctgtacgataaaatggttcatgaactttctacaccattcacacttggaaagctgaaaagtttcgactttggactcagactggctcggatcaaacaaggtacgactgaggaatcagaagatttcacactgaaggatgtagttcttaaaaaagctgaggtttatgtatataaatatgtcccccttggaatcaggctatttttaaacgatggaacgatgcactattttcttaacagtgttaataggccctcttggcttctatttactccagaagcaaataagtctcttttatcctacctggatacagtcagagctagattaaacacagtttcttcattggatgtttgtaggaaactaacgagtggctcggctactacttatgaacttcctagagatgctggtactgaaaaggttcaagtaacactatctactatggaggtgtctaagccaggattgacagggcttacccacaagttcactgatgacgttaagttatctgcattgaattgtaacggtaaactgttaactggtcttgattatactgctgttagaaatgtacatgtttattacagaggagctgttcctgctgttgttaaaactaactctgatccaaggtatttcagaagtgacggaacaggtttattgtcattgcaccctcttcctcagggagcaaacgacttaaccgcagaacaggttgggaaccttttaaatgaagtttctgaagatcttggacctgttttagaacttaaccttcaagccaagtcaacatatattgcaggtggaacttctgtgaatgttacttccaaacaactaaacagtgaatggaacgtttatactcactctgtaccagaaactgctcagaaattcactgtttctaagtttcttaaaggtactgaagatgttaatggacttcctacgtcatctacttattcatctgtactcgttggtttaaaaggtgatgttccccatgttttagctttaaagaccgtgagcaatcccagatatgtctggtacgtctttaacaaatacaagtggctctttgattatgacagtgacgaacttccagatgattcagagttattgggatatatgttagatgtcgaagatggtcttgacaatgaatatgatttcgagcttgctccaggattgcacagcgattcatttgctttagattaccacgatttgtatcttggtcttgagtcatacacatatttgtcctatcttccattttctaagaagttcccgttcttggtcaagtcactaatgtatgattctgttccacttgaacttcctggtcttaattcacaacacttaaaatggttatctgtatacactctttggaaagcccctgttgtgtttaatgcattcacccatgataataagcatttgttttatgaaaatacttctgaaggggtctggaaaaagtttgaactggccgaactttcagagaaaacattatatgcaaagttgaaggaagttaaagacagagcttcatctagcttctcacctgaacttactatgaaagaatcatataagaaatacggcttttctgttgatgtttctgtatcagatgttgatggtgtttccggatttaagaaatatgtccacaaactaccaagatccgctgatgaaacacgggataaaccatttacagtaccatctttgagctacaactatgttcccctaaacgttgttatgcctaaaggcacaatgacacaactggaagtatttcaaaattctgatggtgtacctcttggtgtctattttcttgctaccctaactactgttacccctgctactgaaggatctgaatcctcatctacaactaaacaaagtcataactacttctttaatacatctggtcaatgggttgcacatgataaaaccgatgctgcactccaagtagaagttttgaagaccaagcttactgctgcaaacgaaacacttgatttctacgttgaagttgatcttgttcacaaactaccgtatgtattttcaaaagatgtaaaggttaaacctgcgacgggatcagttggcgaaggagccacagagaaaaaagctgttgatttcttggtaacatttaacccgaggcctttctataagtatactacatatactcacgttccgcaagttagagttggtacagatcctgtaaaaactcaggattttgcaccttttgttacagcattcaaagaaaagggaacagtcctgaaaggttttgatcttcttaaggttgttaaatttaccgtatattggttggatgattcctatcctgtgtttgttcatgtgaccacctccaactcaagcaagtacttcggtcgcaaagattctggtttatgggttccactgaaaacagccactaatgctcttgacgacgtagccctatttgaattgttatcaatggcaagaaagaacttcgcttattccgcagatgtggagttgactgggggccttgctgctggatattgggagaggtacttcaccaatggccttgctatgaaagtcgtagatcaaggtttagttggtcaaacctttaaatcataccttcatagctcggcttcagttttctcgccgacttttaagctcatgaattttaacctgtggggcagatttgtatacaaagtccccgatttgggatatacccactttgtaagagtagtcactgatttgcaagatttccctcttcttatggaagttggaagttcactttataatacaaggaatggtccccttagatattactacttccagtatttccctgatcctaactttggttggttggtccatactttacttgagtctaaaacgaagttgaatgaggagggtctgttgaatttactcaaatttatggttaatcactcacccaatgttcacactttagtacttgataagaaagccaattataatagtaagactgatcaaaatgttactgtttctaaagataatacttcacttcctgaatctaagttcgaagtttggactcatacattgtctgatcagtcttctttcaagactttgctgttagaggttaatggaaaacgtgtagtactagtaaataaagttttaaaatttaaacttgcaaaagtttactggcttagtggagtaccggtacacgtagagcttgaacacgccgaccagaaggggactgctaaaaatgttgaggatagattgcattatttctggactaatggagatgtttggaacaagttattggatcctttagttactaatgaaaccccagttgctggtttacatgatgtattactaccttactacaccacacatgtcacattagatctaggtaaaaggcttaaatctcatatgactggacggcctactcagttgcaaatggttgagtacaaacacgagaattttgatctccctgaggaaatggttggatatctcctgttctctgatgaaactggagttaaacttgataaggtcatgaatcacggatttgactttgcccggtggaatctaccacttccaaaaaataatgtataccgtgcagtagtttatagtccagactatttctattctccagtatttctagagttattgtcaaaatcacctgctccagaacctggggaaaataatgctatggtggaacattatcattattactatcctacaagtgctggaaattgggtatttctgaataccgatgaaaaaaagttggaccttggacaccttcgtcttaagcttgaatcgttcacaaatcctctcccagttttgttggatttggccaagaaaaatggcacttatggtttaaacgaacttgctgtgaccaaaacaatgcttcactcaactaatccttacgctaagtatgtccataagttgacaaataatgaaagtttcctcactggtaaatgggtgtttggcggattagttcttagcaaattacctttggtcagggccaaatccgtttctgtttacttctaccaggatcttgtcccattgttagttgaggttgttgacgacggactagtccgacatttttcagtagatgcaaagggattttggcttccagacttcgttttgccaactgcagttctatcgtaccttgattatcttgttaatgacttgatgctgtttggtaagtctactgatgaatgggttccacagctttacaataagttcctttcagagtttgaacttgtgccagaacttcctgctccaaagtcaactgtaccagctcaagccggtgcatctggtcaacccgcttcaaacgctgctcaaactggttctgctcaactaccttcaggaacaaccggtgttcaagttgcgacctctgcagtaactaccactctagtccgtgctggaactgcatcagaacaaagaacaggcgttttgaggactgtaacttcgcaagagagacaacaaacatcaaatgttgaatctactggtcaagttgctcaggttaccgccgctttgtccggttctgtcgtccagtctatggctggcactaaagcaggggccggcggagccgattcaactcagtctactgcagcaggaacacctcgtgccgaagctgctgctgccgtgcctactgtgaaggcaacaactggggcagatggagtttctggatcgtcaaatagtgttcttccattatcaactgcagcccctgcaaggaaaccaagaaggtcattccgtccggtagctttagactttgacaaactattcttcgcttatgtgtctttgggaaagtttgtggttgtaaaaagatttgagtatgtcccatacggttataacttttcaagacattctctcttaggtgttaaatcacttttcgacaagttctttttaaatgacaggatgtattctgtttcttactattctacacttcccgttaataaaagaaaagtaagctctcttggattttattcttgggctgataatcctttactgttgaagttaggtttcgataacaaaactcctaaattcttttcattcgataaaactgccgatagttggaacgcccacaatgttgtgaatcttgatgaggaacttgaggatttaaataacaagttaaatgatgcatttgtgtttgaattgtcgaaaccactcaaagttgaatacagatattataataatactgcttatcgtacttctttgacttcaacttcagagaactcagcatttttttctgtaacttataaaacatatcgatacagaccttcaacatcgaatttggtagatgacgtttatactcgtctaaaattcaaggttgctaaacttaggttaaatggagttgatctttcagttgatggacttccagttgacatgagtttttatatgttaaaggttcactcttctaagtcacttggtaaaccattggttttagtattatccgactataaacctgtagctggtacagatggtgtacttgtaacgactgtaactgaaagtactcagatgaatactcattaccattatcatctgaacgctgaaggatcttggacattcttcgtaccagaaggtgacaatggtgtgaacaacaaattggttgaacttgaaaaggcgtttgcagtacgaaaaacattggatttggcagttgttactggtgcagcaacctcagtgtggtataaaacaaaacacgaagactttactgttgatagggttttccttcaattactccgacctcattccccgccagtatcagagtctggtgaatcctctgctccacaatttaaagttgtcgatccactcttgggattacctgtaaagactgaattaccaggctctggtttatttttaaatgttcctcttgctccctataaagtacctgttggtccagaactcggtgagggctttgagctctatctacatcacaagccatactttttgcattctgctgcttcagctcctcaacaacgtgtcatgtctgctgttggtcaagctgatgcaccggttcaccctactcctgaagttgctgctgctgtcggagctctaagtgcttctctcggtcaagatgtttcagtttcttcacctgctgaagctgttccaccagctgctgaagctcctccatcaaatgctgaacctcgttccgcagctgcccctcaggcacaggctcctactcctactcctactggtgtagtgaaatttcaaaagtttttgttgaacgacttgtggctttctggatttcccttagattttgctgcgcctttcgaacctcttgcagatggatacgcaggtctaacagtattttaccagaagaattcaaataacccattcatgtttgcattgtttgcaccccttgaaaactctggatctcttgataaagcgttttaccacgtctgggtcaatagggacctcaaatgggtgaagactactgaattgcaagaattttacaagctcatgcgctcagttgaactaaggctagatttatctgaattctcagaagtacttccaaaattcacccaaatgttaaccaaattttcaaatgaatccaagacactcttgactaatcccttccggcttgatctaaatcaagacgaccgtgttacatttggagatgtggttgtagatagagatgctgatgttcttccagatttaaaccttgtcaaggttacttttacaccatcgctaaccatgggagattcaaacgctgcgaactttactttggaaaaagtgactaacttcaaaaataactatgcaggttttagattccctcttttcggggttgtgagagtaaatgtctacttcagaaatgaacctgatcgctatgccaaagtccctgtgctaatggaattcgttcagaaagcctctgagagcggagctaacaagttaaatcactctttctacgcatatcaaggcggtaatgagtggaaattctactttatgtctctaaacaagttggaagatcatgaagtttcagatttagtcaactaccaattgtaccagttctacagagtatctaaattacgcgagaatgctctgctacttgatctagatactaagttctctcacatgaattggggccgttttgtagattctgttgaattttaccacgatcctactccaaatgcaccattaagtcctgttcctgaagggttccttctttacaggcactccatggctactgagaacactacctttactcttccttttttcaagttacagggacatgtaaaggaaactggatttaaactgcctttcgctcagtatttcgtatattataaggttggcgaacatgtgccatttgtttttgcattggctcaatgtgacaatgttgacagacaaccaacgcatcactggtactttgttaagcaaggcgactatgtcaagtttaaatttgctgaagacgtcgaccccgataataaggatagtaagactaaggttgctgagaagtttaaagaacttctaaattctccaccggctccactaaatgaacccgatacattgaattcactacccactggaactagccttacattcccgactttccctctaactgatccccgagttttatccaaaccatcgaatggagtaccaactcaatctgctccaaaaagttacaatcttagtggggaactcgacgtaggtgatgactctaattcatggttctaagatcacttaatgtacgtttttattattttaattcacatgtttaggagattatatatatactaacatatgagatgttagtaaattatacaataatataccttaacatttgtatgaaactattacggatgttaaattttaccttatacacaaaatattaggccgacgcctacctctaatttctgaacccttactttaactctaagcaatgggttctcatctgagtcgttttaattgtatatccaaacttaaaattatgattatttatatataataggcactattaaaatttagtaatatgtatgtgtatatttagggattagtggcatctacgatatgcaataatggttccgtgttcttggtattcagattttgagatccacagctgttggaagcgacccagactagctaaaattgagcctcctagccatgttgaaaaccttttctccagatacgaagatgaatgtacaagcttaaatttagatattgaacctattgtacttttgaggagctcatgattaagccttggaataatcccgtgtgtaagagtaaatccgccggctatcacaatcgaggacagcagttctcttcttatatcgacgtctgactcgaatatacagtcatttatcatgttaacaatccccttgaaattattgaactctgagactgttgaccctgatggattgaaaagcagctcaggaacactggtagcatacttttccatattaactacagtgccgtctggtaaattatacttcatactcttgtccttaaaatttttaacatctttttggttatggtgtaaatggttaagatttgcctttcctgaactaacactattctcctgattctgttgactgttactagcaccatcagtggcgttagtatcttcagatacattatcataaaaacagaacttttctctgagttctttggctgtttgaagccttaaatactccttgtagggatcacttgagggttcaaacaacctgtggttatcgttgtacagataatttgcgagttgtaaatcaagtgtattcccaccaactagagagtcctggattgttgactgtaaggaaatgccctcatggactggtgatactgtacaaccacctgctccaatatctacaattagggctgatgatcttccaactgaaaatgccgtgagggccgctctctttgccaaatatgatgcgcaagctccaatttgttcaaaaattacttccaacgatgagtctctgaattgtttgctttctgctgtcggttccaccaccaaaattgggtgcattgatgggtccagtcctaaccctcctatcttgtttactgatttaccgttatcttcaaagtccagaaagagatcatgcccttcaataccgaaccttaatagtctttcaaacacaaaagggtcaagatctagattattgtccctgtttacatgaaggagtcttctcatctcagcaaacggtcgcaccttgactggtgagagtatattccaactttccctagaacttgctggctggtcaaaatctctatacaccaaactcggtatatactctcttggaaagtcctcttgacagtttccgaccctcatagactcaaagcctgggtctactactattgcggaaacatcatctccaccgctttgtatcgaaactactggcatatccgacagtataacttaatttcagttatttaactctggactggttaaatttatacgatctttcaactgtagttttccgtcaatgtacctagaaatttccttaattgacttaagtgtcctaaagtggttatctggtatgttcaaatcgaattcgtcctccaacagaatcaacagctccactttatccagcgtatccgccccaaactcctaaattctaaatcaattattacgaataccttgtagaaatccgaatttgggtcaatttcttcttttttcttgtcaaacctctgtgctactagctccgtaacggtgtttagggtatcagaaccggacaaaagtgtaaatttacttttatttatgcgataaattggtgatatatgaaaagttttaccacttaatacaaaagaattgatccctaaacacatatattaatgtatgtattggtaccgggtatcaaaaacaagaaaataactacatgaaacagatattttatagggttatttatcattataaattttcattttaatttataacaatttaaaacattatgttagaaaggaattgtagtccaaattggggatttgagtaggtgtgttatgtgggtatgattccacttgcgatttgtcactattttcatcctcttcatcttcatcggattcttcaactttattatattctataacttcatcggattcctttaaattgcagatattttccacatcttctgcctctatttcagtagtctgttggacacacaggttttcaatttcctccaaatgctaaattttgttattaattaaaagataaatgaactagtacctttctaagatcttctgttggatctattttactttcttcctttggcggttcacagtaaaagggcagccttcctctttgaaagtcgtagagcactaagaataagatttcatctgtttatggaattttgtttaagaattagtggatagatttttacctattcttgctgcaattgagatatctgggaccttgccttttttgaactttccaaatttggctgcaactagttcgaggaaattatcctctgtaaagtccttgattccataccttcgtacaagtccatccctacaaattacaagtaaaacaacaatttcttactttttgactagttctatgactttgtttatgtaattttctggatctgggatcctttcaactcttattgctccctttagaacctaaaataataagccttttaaaaaagaataccttatctgtgtcatctccctcttcaaatggagtaactcctgggcaatcaatcaggtggattctctttgtcaaacaaacatattgccatactcttgtttcacctatttaatcaaattatcacctttcatattatggtttgttttgtgaaataatttacccggtatcggggcagttttacaacttctattccctttaagggtgttgataacagaactttttcctacatttgggtatccaataaatcccacactaaagtgcttcctatccttgaaaagctgggaatactgcctaaaattttttaaaaaataaaaaaaaatactttaatagttgaattagtgtattttttccaaatgggtttttgactgatgcgtgaaatgccactgttgtaatttctctgttaaggtgcttgatccatgctgcagtaacccaggatggtaccaagtcacatttattcatcaagagtatcaaaactttactgcttttatgttttttcatataattttcaagtctcaggcatctggaaaaaatgagtattaatcaatttacctcgttcccataggatctcttgcatcaatcacttgaacgaccacgtcagaacagtcaatgaccttatacaactcctaaaattaaattaaaaactatattaattggtaaataaaatcttactccccaaatcctcttagaagtgccttttttgaaaatcacgttgggagtctcatcagttaaattgtcaccgattattgacagggacgtgtctttatctcgatcataaactctagagtttacatcagtaaccaactcttctattgtggaaacttgaagtttcggtctcttgcgcctactcttccttccaaaggtatcctccagtgactcaatggataaaatcttagaattatcaattttaatattagtgtctgtaagcagagacataggtaatttactcctcttgataatgtgcctaaagcgtgattataataatagtaacatacgttcttggatcatccttaacagagcccagttcgtttctaaaattcgtcatttgttcctgtgtcaaaactctcgtgtttccgaaccatcttctgtctgggttaattcttgccggatctaaggttttagctttcatttttgaaaaattaggtttctccttgtacatgttcagccttttaattgtacctttagtcctgtattggcctaaaaatattattaaattttataaattctataccttcctttaaacccttgggaggagctctataaggattcgtagtagcggtcgaagatttgaatgccggaaaaggctgggccttcgaccttttcatcctgcgattctttttagaagacttcatttttgattaaaaaatatattacatataattaaaataaatataaatataaaattaaattaaaaatcttgatcttcatcctaatatatgtgcctgatacatatagagctgttgttgagaaattttctgatttcacattatattaatttgtaaaatattttaaatttgtgtgttaaaatttcatgttcatgtatgaagatgaatggcgcagttttcctggaaagtcatagaatctaagcctgcctccttacacagcgtattagagtctgttgaaaagtgtaataatggtaagtttcttgtccaatttttatctattccacgtcatacaacaattttatccaataattttgtaaaattgccttcagatatatcactgtgtttacactcatcgtcgcataaaacaagaatactatctcaacttgagacgtttttacaatccgtcagggaaatatctgaagatccctccttcaaacaatatattgaaacccttccttccctggagtttttaaaaacaacgtatgtgtttgctttttatttatatttacttaggggagtggttcagatccacccatcgtatttgggaaatgtaaacagtggtatttacgcttatttatcaaattttctgatgcagtaagtttaaatcaaagtaaaattttcaagttacaatgacgatttttctggagtatggatcagttgtggagatattgttcctctggattcactcgggtatcttactacaggagactaccagggcctagtttctctcagaatatcacttagggtgttggcttttattccaaagttagatgttattataggtaacacttccctttctacttttattcttagggaagataagtcggataaggcctagaagcatttcagttttagcttacggaatatttaacgtttcagtgaagcctgaaaatctgccagaaattaaacaggaaaacagtgagtatagtttggtttgtaatggaaagactgtatcggagaacgcgttgctgactttacagctcatcggtgtaaatgtattaaaaaggaacaaatggctaaacttgtctgcaaaattacataatgtaacggagtgaatatattacttaagagctgaaagtttatcgttacacattttctctacattacttgttgacggcttcacagtactctcaatttgtgactaaatagctttgctgtcaagttaaaataccttttgtttaaagaccatgtcctgactaagccctgattccaagttttttaactttttcatagtgttctgtctcgccattctaaaaaaatcagaatttaaatacgaaacctaatttgatccaatccctgattcataatcctcttgacgttttcctgggactttttcctaaatttttttaaaaattgattaaaatacttgatgtcagcgcccatttgaggaatgttgaccgaaataacactaaaaaatataaaagatattaataaacttttggattaatttgacgttgtagccggttaattcagtggagagagtggtgaatatgtcatataagttatccattgataaaggagtgacaaccagctcaaagttccccttatttactatagaagataggtggcgtagctgcttctttccatcatcggtttcgatgaaaatgtgaccaatcaaactcggactaaaagttcataattagagtgtacgtacgctgctttgtgttcagagattttggcgagttcagacctaacttggtcttctatggatttcaacttggtcttgaagtcagtgtgtaactggtccaaaacctccaaggaaacagcggtatcgccttcgtcttccacaaatcgggaaccctttttcttagatccgaagatatggaactggtttaattttgcgatattgcgatagttggagtggaatctgaaaaattgtgtaaaacgaattgtaaagaaacctgaatgaggtaacatttggtatatttaaggtaaaaaatgatacataaaaaatataaaatgtgaaaatgaaatttaaatataagaaaatcttagttaatctgctattaaatccgaaaataataaacattatgtgaatgattgtgtagaataaagatgtaaaaaatagtgttaaacaggtgtataatgtgataataatagtaaatttttttcatatattttgtgagatttgtgtataattattttttaaatgggaaattaattggttgctgttcatttttaagtaaaattcctctaattcagggaataacctaatttattttaatcttcctttgagaatgatttttgtgtaaaatattgagtttttttaattatttaaattttaaaataatcctatcgattttataatagacaatcgtcagcttttgtaaaataattttggtcaatttagtataaccaatatcctttgcttttctccaataattaacttttaaaattagcacttttatttttaaaacaaatggtaaaacttaagaaggtcataggtacttttgcacctgaaaacatgtttccatgtgtgtagcatgtgatgtgttgcatgcttctttctggattcagactcattatccagatttctctctcataatgcaacatttttgtaattttaatatggtattttctattttttaaaaaaataactctaaatcttatggattctgatattgtggaggcggtaacctggttggcggctgaatttgctgaattagccgatttaattgatgatccatttccagaagagcataatgaatatcaagttgtaccaataaataaaatttctactgaaacaatcccatcttggaactcagtgaaactgccaaatgacgagattgctctgtgtaagtcttttttctcataatttagcaaaatattcatacactaatggttaattatcagttttagtctaattaagtatgaattaatgtaattttcagcgactagtgttcccaagtttcaagtgaacgaatcgataaatagaaagattcacgtaggttccgctgaccttttgggactggaagttgaggctttgactatttttctagaggagccaaacaagtacaagtccaaactggttaaaagactagtagcccgtaggaacatacacattacacctagttatattttatcagtgtttatggagttttttagagagtaatggccagttggaattagatcaggttcacaggatgaggtcaggagagtcacatttgtcacgggtgttcaacgttggaagcacaaacgtgattttcgcaatgatctgtagatactctagaaagtaccatgatgcctcaagtaacatattaaacatgtcaataagggaatcgctaaaggtggcaatagagaaggggatagagattctggcatatccagtttcaatagaagaggatgtagtatatcctgattatcagtatctagataccctcttaagaacattgaggaggtggcttgagctgccagaagtgtcttctaaaattagtaaaatttacctaatttcacacacgccctcggaatcatgctacagtgacgattctacagcaagtagcattggagcgtataactgcatggaggtaattgggaataaaaatgagactaacaaggatttattcaaccttctaaggagatatttccctagaacaaactacgaagaggtaattaaagagattttagatacgattcacaatattttactactttctttcatattataatgtagttgctgagcgctgatctggctacgaccggtaatgtgaatggcgagatagtagcagaagagaggaacataaggatatcagaagggtttaacacaatcagctctaaaactgtatcaactaagccagtaattaatttggctgagagccttagagtctcaactgattctgatagcacacagaaggaatctgaatattcatattatttgaagctgtattactcaatttcaaagcttccagtctacacaaagttgaaggacagcagattcgtagaatggcagagaacagatccacaaaaaagaccggttttgataataaatgcaaaaaattatgatatctcaaacccagaatacgctctgtcctacatcctgggatgtgtaaaggcgttcatccatcacaagtttgtcatcgtggtcctacacctaggtaagcttataatgtttaaaaaatttagatcactcgattatcaactcaacaagccttttgaaccttctaagtaacctgtgcagaatattcgggaaggagaggaccaagaacatcgcagctatttacttccataagtgtagctgggcactcagaagttatttgttttttacctctgcactgctcccgactgaggtgtgggatgcaactgtatttgtagattcacatcgggaagtatcccatttgggcctggatccctcacttttttaacaccatatcgtacaccatataatctcaacaaattcttgtattcattaaatattatggtagtaatagggttgtttgtcagagctgaattggaaaacgcctctgaagtcaaggttggacccgaccatgtgtggagcctgaaccttagggaatcagatggctttgaaaagagggacaacgtaaccctaactgcgtcggagttggcggatactggaaacagcaggaattcggtgaatttgtgcgttaattttaaggaatccagaagaaaggcgacaataacactgcgcaatgtgaaggatgttactagggattttttcccatacaacaacgattactcgtgcctggttgcctttgattgccgtggtgtggatataatgtcctggaatcctaacggaggatactcggtggtttgtgacagtggcaatgtcatcgatgacgtcactttcgaggacggatcctgggttggatacgacgaggtattttaaataaacttaggtaaattttaatttatttttagaaatctggaaattgtgtgtcagttttgaacctggagtatgaactcaaggttattccatgaacccacacactcaccacctccaagcttaattttaaatttctaaattttcaaatatttaaatattttaacaaataatacaaagtgtgtaataaaatacgtgtatttatgactaaaatgtgtgtatgaaattaaaatatgttacatgttaaaatttacagtttagttatggagttcgtaagaccttcagtgctgttttgatggaaagtgagttcataggcgagttgtttaacaatatatggaggagattcctcgcacagaacctgaaggagtagaatccacctctttacagtctcctcctcatcggcagaccagtaataaacaatcttatccttagtagttacactgaaaacaaagggcctactcatatgagtgccagtccagctaatcctagaattctttaaattaatagtatctttaggcctggtgtcatttttacgatcaaagtaatacaagttaaatccacatacgataatatacctcagattccaggaccacgatgagaaccctcttcccagtttatataaatatcccgtaaaagtaattggtatgtcatagattaaagtgtcttctggagtttcagatttttttcttgaaaccgtcgaactcttgctgggagatgtgtcaccaacagtgctaatgatcttcttagtggttgtctccaaactgggctttggcacagatagttccacagatatcacttcgctttctctagtcaattgatcacgtttatctactgactcatctgatgcagattcagtggtatctgaagtttgagttgcctgatcacagctaagactctttacaatagtttgatcagaacgcaaaacaggtgtggaatacaagggcgtggatattttgtgcgcctctgagagactggtgctaattgattttggaacataatcttcattttcagaatctactaaatcttcaaagttttcaactgcgtccttaaactcagaatcgtcgtaggataccacaggaattggacctgcaagttcgatgtttgttggagttaactcatcaagttgctcaattaatactaatttttcatccaaacttgtggttctagtttctgataatgatacggcgcgatcgccttcagatactaagctggaaatagcttccttatctagttgaggtacttgtatcttatcagaaaccacctcagatttaacttctacaacttcagtcttgacaacatcagcttcattctggtctgtaggtgtgggttgtggaagaggttctagtgaaggcggctctggaacagcaacaatatcattgcttgacattgtaatctccttgggaatagtaattggtgcacctttttgtacattgacaggctccagttttaaacttttatcaagttttttagagtataaatttttaaaagcctcgttaagcttatcgtagcagtcgacctccgtaatccttaaactttccaaactcaacttattccacttctcaaatgaacaaagtcccatacatgtgtagtaaatcaaactctcgtaaaaaaaggtgataatatagctctcgattttagaggataacagtccgaagtatggaatgtttagtctgagtaacttgtacgatacaatcccggaagattccgaattgttataccagtcaccttttactgggaaaaaattcccaaatttaaaccttgttatatcatattttgggtcatagttctaaaatttggtgtttagttagttaaaataccttcaatttattaaatttagttaaatccacaaagatgacctgccttttgttcaagtcctggaggttcaggttcagaacgttttctgaaatatttagagattcgatatggtcggtctgaagagagaattctgcagttggaaacacttcattataatatctagtgaatagcttcggaaagagattccacctacattaaaaatatgagttgtgttaataattaaaactaacgatttctcagtgagtattgtgagtttagagcctaaaattgactgcaaccagtttggcaaatttctgaaaatttgatttataaaagagttagtgaacgaacttagcaaaatggtatcgtttttcggtgtagtatccgacagaaccgttggatttgaatttttcgtttcgaaaaatctccaaaccgcttccaccttccatttctctaagacttgcatctatcaataagtggattgaacacctttggtagtcctatgataaaaattttcagtatgtttgaactaacacttagttggagaggtatgggcattcgaaactcgacaattttcattttagtagccttttacttggtaaatgactggttttataaattaactcaaatttttggcttcattctggaatctatgtaaggaacgcttgaactaaacagttatttaagtaaatgaagagacatttgtaaatttttgtttatttaataaattgaaataaaaattaaatcaaataaagcaatataatgtttaacacgatctcatgtgatttttctagtatgagtcaaggtgatagtgtagaagatcatagggtaaatcaaaaagtaaaatttgaaaataattttataaaatatttaaataataacgatttttaattgatgagaagatttcaaaataataaacgtatatatttataaaattaaaattaataaacacccgatccagactatgaaattaatctttccactagtctaaattatatacagagattatttttaattatttatttaataatttggtaaatgattgacaaatatttatttgaagtggcttgatagaggacaaaattttggaaaataaataatcgtggagaaggtgtaaaaggtttgaagacgaacatgcttttgaaactttagttatttataatttatgtttaaaggaataaaatataaggaaattagagatcattgaaatttttcagcttgtttacagtcccttaaataataaagagtccttcctgatatttatatatttttaaaaacatataatttttaaattatttgagcaggaaaattgggaataaaatgtaatatatataacaattattgcacacccttgatattgttaccccctaatgtgtatacgcttagacaaaatagtttcgatacatttttttccaacactagatcactgtataaataatcaaccctcttaaaaattatacttagttgtactataaaaactttctaaatcttcgttgaagatggctgatcaattaagtgaggaacaaattgccgaatttaaagaggcttttgctctttttgacaaagatggagatggaagttagttttgatttaaatacatatattttttcacgttttctcagtgttttataaataaattgagattttttactaaaatatcattttcattttttataatttccgattcactatttccccgaatgtttaaaatcgattccttactgtttaataacatttaatttacacacatttaaaaattatatcattaaaattaattaggcataacttcgaaggaacttgggacaattatgagatctctaggccaaaatccaacggaagcagaattgcaggatatgataaatgagattgatgcaaactcaaatggtatgtcaaccttaataagttctagatgagtggtttttaattcctttaaccagttttctaaactctcatttttatcttgaatttaactagttattacatgtttaagcccaatgaaacagttattgataatttaatttcaggttccattgattttcctgagtttctgaccctgatggcccgtaagatgaaagaatgcgatactgaggaggaactcattcaggcttttaaggtcttcgatcgtgatggaaacggttagtctgtgtttcttttttatcattagcattttcataattcagttttaaatatatttaattaaacgttctccgttttttcattcatgagattaactctgaaatgtttaggctttataagcgctcaggaactcaggcacgtaatgactaacttgggtgaaagactaactgacgaagaagtcgacgagatgctgagagaagctgatgtagacggagatggaaagatcaactatgaagaattcgtaaaactgatggtctcaaagtaaagtgtaataactaactttaatgtaaattcttatcccaaatatatgatttatttattgtggtatagccattttaagatttatttccaatgccatttccccatttaacaattacaccattacctaatagcgatctattaaaaacaagacttccttctttaaatttctcacaattttgtactttttagcatttttctctttgaggtgtaacaaatttgtcgtgttttaatccttaattttcacaagcactcactagtttaatctaaattcttgcttcttgttgtaaattagtaaacattattcaaaaactaacattttcctgtattattaatttttttctttggtttgaacaggaataagccaggatggtgggaaaaaaactagaatgcgaccagtataccgcaatgatcggtttaatgaacctatcgaatgatcttctgggagaagatatcagaaacatggacttaacattgataaaagagctccttatgaacaaggtgttaaatttcaataaccaactgaggcagatatgctactggactgaggcgtcaaactcaaatgaaaaaaaacgcagtttaacccaaaagtttacagatttattccaatcgaattctcaatcgaaggcaaatccagagtcgtcagaaaacacaaatggaacacaagattcatcatcgaagcacaacaacttgattaacagactaaagaatctaaatcgtaacgaattctttgtatactcagcttctttaagttttaaccccaacgtgaagtgcggatctgaccttctgaacccctccattggaggagggattgtgttcacaatcacagcaaagatgcccttggatgagaagcagaggaagttgtatctccaaattcttttgcgctacttggggaaaaattcggttcttctccaagttaagtctgagagttcaacttcacttgataaaatcttatctaacactaatgtagtacatgaggatcctacggctgatggttcagctgttctgaaacccattcccaaatatttcgacgaagactattcagacgaggactcaaacgacaacaaatgcagcaatgattatgttccaaacaactactccttcttccgccacagctcatacttgttatccaagtatgccaacagcaagttggttgtcaaggaggaggacgataagtttgtaactcagcgcttactccaagttaagctccagagaggtagaaaataattgtaatctagtgattaatttcatattacaaccatgcatgactataatatatgtaccacattcctttactctacattatgcagtatacactaatcaatatacagtagcaatatacaaactaacagtatatgtaaatgtgtatgacattaactcaagggtattttaatcttaataatcgagtcagtaacataatactgaaagacgtttaagaacaagggagaaacaatcatgacaaaaataagcttaagacggtgagattcattgaaggggtgtaaaatgtaagaagtgattaaattaatctggtatgaaaagatggtaaacaaaatgattgaaacgcactttaaaccagaaacaatgattaaccaggtgtaaaggtttagtaaaaactctttattgttccttttattggaccacttgttaaacttggcgtatagtgaattaatattgtacaaaaaataattagagtaaaaactaggatttgggaggctatcgtcaatgagaaggtcatcttcattaccctcattaccattgttatcatctaaatcatgtaagaactggtcattgatggaagttcgtctagagtcaagagcctcaaggtccttacccacgtttggcttattttggataaatatttccctcgaatccacttctacgttatgttcacctagctcgttgtggttatgtttgccaaactcaaacattggattaatgcttgctgttgtcgatatactagaggttccagtgaggaaaccagagtgggttgagtttaaggagtttattgcaaacttctttgcatcagccaactcttgcgatgtgggagtgaacttagacttacgattattctttaaataattacttgcggccttctttatggccaaatacctaactattctatactctatgtaaacgccaattgttgcgtcaaagactgttgtcataaagtacatattgcattcgtcctgaacaaatgaaccgtctccgcccagccttatcttatttattaagattgatgaaattatgttcaggaggtgaactgtgcttgatccgcacatcagttgtacaaaatccataaaaaacaccttcttcggtctcctcggaaactcaaaatagtacttcaatagtaaaattaaaactgaaattgcacacaaaacaaactggattcctattccaaagagccctggaattaatgtacagacctcgtttgacaagacagagggtgtcggtgtgttattagccaaattcgccaaatttttagcgacattcgcctgaacaggtgaggcgtctataaaggaaggagaaatattattgatttctcccattaaaaagtgaatattaaaagtatatgcgataagatcttttaaattataaaaaaattatcccataaaatggttaaagttaaaataaatttaatttttcagtagattttaaaaacataggtgaaaaatattgattaaaaattcaaataaaaagaaaaaataaaaacaaataagagtataaagacttacattgttgtaagaatgaaattaaactcacaataaaatagtgaaattaataaataaaataaataaaacttttattgatgaaaacaagaacgctgaaaaatcaaaaataaatttggtgaagaaaataacatatatggtgaaacgattccacattaaaaaaattaagggggaaaatataaaaaataaacataaaaagtgtttagaataagtatcctatataataatctaatgaatttattgaaaataaagtataatattgcttaaataatgaaaaaaattgaattaaaaaatagataaaacagataaagaataaaaaacaataacaatataagctaaatatgttttggaaataaaatttttaaactgtgtaatgtttttgaataaaaaatcctaatatgataattattggcgttgaatggggcatacaatcaaagactctttaaaatataattaaacccacaatattatttttttaattactaggaatcttagttccagaaaaattttatctcgttttagacaattatatcgctttttgaaatagctgtatataggttcgtcatagttcccgatattatgataaacaattaaatttatacctaaatcccagttacaaaaattataatttataaccagactaacaattttatgtagtattttataaacatggtcaagtactcaagagagccaagcaatctaactagaagcgccaaggcctatggagcatatttgcgtgtccacttcaagaacacctacgaaacagcgacagcaataaaaggaatgctggtgaaggacgcgaaacgttatttaaatgacgttattgaacgcaaaagatgtgttcctttcagaaagttcagagggggcgttggaaggtgtgcccaggccaaggcattcaagcatactcaaggtagatggccagagaaatcgtgcaaattcctacttgatttactcaaaaatttggaatctaacgctgaggtatgttgtttgaattgtaattatttattttttcaacattcttataaacttaactgatatcaaccgtatatgatgacacgatgacgagtatgattgatttgtcactatttttggcaattcttaaactttgacgtttgaaatctgatgcgcctctagtgtgttctacactaagcatatctcatttcaagcatcactgtccatttgattacttgttggcgtctgataccaatttaaataaattttttaaaaaaataaataatcatgagtgtaataaaaatctgtaggtcaagggacttgaacaaagtaaattgagactcgaacatgtacaagtaaacagagcgcctgtgggaagaagaagatcgtacagagcccatggtaggataattccgttcctttcccatccttgccatgtcgaactcattgctgttgaagatgaagatcacgtcccaaggcacacatcaacagagaaaagagtagtcaagttgaataagcgtgaattagccaggatgagacttagaactggaaaatctctctcataatctacttggtatttaaaatatatgataatcatcagattaaaatttaactctaatttacatgttttaccatggggattttggtggcttaaagtaggctgttttctttcgtttttattttaatttcatgtttcatgggatatttgaatggatcaagaggggttacattcaataaactagtgaaaatgatcaagggtatttctagaagaaaggattccacaatttggaatcaagaaaatgcaaagatagtttcaagaatcacagacctagtcccctcgatagcttttttgatgaaagaacaccctcagcatatcccagtaatactttatcatctatcttccttgacttctaaactaaaaaatgaccaagttcagaaatgtgtaaatcaaatctcaggaaaaaatgattattttagttgtaaaacatgtaaaggactctgtaatgaggtttatgaaaattttattcctgaaattaggggaaatttacctaaaattgatccaaaggggatttcacatctactaattgtttattccagttgcaagaaccctaaaatttcaacattcttccccgaattacttttgagaatgtcatattttatctattcttctatcgaattaatgccaaatttcgaattttcagatgaaattgaccatttattgagtcgcttttcgggattgataaagtttaaagccttaactgatttgtctgaatatgattatttgaagatgtttgttgatgtaataaactcttcagataatgaacttgcttcaagagagttgctagttaagcagtctaaatactatatacctgtaaatttgatggatgtttgtacggccttggagtctataaactcaggttcttttcaagatacattttacaatttgaacgagtttggaaaatcattaaagtattttgtccttgaactatcatttaggtttttgttatactctaaatttacaaacttaatcagggattgttctggaatcagacttaaaaacaacactgaaatggatacaatttgtagattaattggacaattcaagaatttaggatatagaaatgaacaaatcgttccagttttatctgaacttttaaccaataatcttgaatatttagaatttagagaccttggtacactactagattcgctatcgtattattcgaaagtgtataatttagaccctaaaacagttgatttcagtaaaatcgcttccagagttaatgatattgtttgttcagataaactgtttccaatcaggtcactttcaactgtgattaatgccatttccaagattaatgaacatggtggaattgatttagaggactatgagagcttttttaaaatctcaagttatggtttgaaaacacaaattttaaagtggcctgagaatcttaagagtccagaatcactttcctcaatcgcaattgccataaaggacctgaaggattatgagactttaaatttagtcagtgaagtcctcttgaagggattaatccctgtcagtaaaactggattgtatgattttaatgtaattttggaggttctaattaaggaacttaagaatgttaacttttatgagaagattcatgaccacgagtctgattttaaacaagagggtttcagtgaaatcgacactgaaaataccgaaaaatttagaggttctggacaacttaacgcaactaaagtttttagttcagtttgtttgattttaactaaatgtagttttcacttttgtacaatattgtcagaaagaccaagtcttttgaggactgatttaagggaactgtgctacttctgtagaatattatctaaattctataagttagattttatagagaatgaatttttgagtgactgtctcagcactatttctaagtttaccactcatttggagtcctttttcacaaggaatcacagggacctctctgacctagaccatgataatatcagccaatttttatcagaatcgcactcttttaattcactaagatgaatttctactaaattaaatatatacttcatatatttattgttaataaggttttaatacaggtagtgtgtgtgttgtaaatgttaaaagattaaatattctttccctgaattggaaaggaggtagaggactccttggtgtttagaagcgcgtccacttcagtttgtaacatctttttcgagtatagattctttagtttatcgaaaaatgcgattccacctagagtggttttaaagcttctctcgggtttttcaaaggcttctatcaagtggtacgcaacaagtctaaaaacaattaaaataaaactactaacttgtattccataaaatttttgtgttttagggggacaaagttgttgtggagagtaacgtcatctctggaatgactataaatctcatcaatagaggatgtatccacctcaatgaccttagaatgcttccctataaaaatatgagaatataataagatattaaagtcatagtattataatagtgaaatagtgataagagaaataaggaaaacttaccaactctgatcctctgtagaccagttttaccgtaaagaagggaattagctggattcctcaagggtaataaatttaacattttattaaatcacataataatattaagtgacgtgtttaaatatacccaacatgggaagaatgtgtaaaaatataaataacatgcaagaagtattatacaaaattattgacaaaaaatctttaatttgaaagagtttaaaacaatatatctcctatctccattaggtgagaaccattacttttctttagattctcatcaacctggtcgaaaaaacgatgtagagacttgttcatgccagaaaacacctatacatatataaattagatgtgtattagataaattaataagtatcaagaacaaacctcagatatatagttagttgcctgtccaacgaggtcagataaggaacctggaaagagttctaatgaaggattcgactctgaatagaggccatttcctatacctccaagaatcaagggtatcctttgctcctcaacatcgttgttttcctgtttcctagattcctgagggtagaatattgtaaaattgtccacggcttttgggctctcagcggttggagaatctgctacagctgggtgtaaattaaccttagagttaacattgtgtttcctctttgaaacgtcattgaatgttctgtatagtggtgtagattgggtgtgattcctaatcatggagtggcgattaaggtggttattagctgaaacatccagatgttgattagcgaagacagattctattgagaataatgcaaaaatataataaagaaagagggtgtgaagattcatcattgtgaaaatgggatttttggattaaaatgaatgatgttgtgaactataaaatttaaaccctttaatgataagtgtgagggaaataaaaaacagaatccttatcaaatgatttaaaagtgtaagtgagagtaaaaataaaaaggaatcacaattgtattgaataattagaataaacacagacggacaatgaagatggtgaataaagtgtataaagacataagattcctaagttcttctgaattctttgtagttatactaattgtaaaataaataataaaatagaaaatggacagatgtatggaacttctatgatataacaacgttatctgtggggaaatcataattaacgcacactaagccaagacgtgtaaataattccataatcttcctctggttattaatatttatctagttttttaatgacaacaatggctttgtgggatggtttcaatgtgtgtaattttggaatcattaagtagacggtcatgtgatatataatacatgaaaattggggtaactgattagattctttcaaaaaatatataaagtttgaataatagcaaatcttatcatgaatgtgtatgtaattctgaggatttacttgatttataataacatatatactaactattttattttatataaactctttaataaatggaatgtgttgtatcaacaacatctatgttgttttatttattttttaagagttactagaatctcctatttttattaatggaccagcttaatacatagtgtggtgttgtgattttttacaatatcatgtactatttgaccagttaatcatttacacattaataatttaaattaatggagaagtgacaaatatggttttaaaaatattaatggcgaaacctcattcataatatctatacaattttaaatgctctgagttttgactcatggatccattatgcatttaaatcctccccttgaaaccatgataataaattaacacttattttcgttatcattttataaatttccaaactgaattccatgtaaattatctcaggtgcacccattgcctatcctcgtttccgctgtattacacccttattccatttaatatttgcgatttaagcttttttaccttcattttatttttagggacattctacataataaattttgtatttttaaagtcatttcggcttaaattcctgctcatttaggtcgtttgacttacacatttttgataatttagttatacataaacaaactgtgttatattttaaaaataataacagtattttggtataactctcaatttgctcagttggtatcaattctggccttaacttgaaccgatcctctatgatatgaatccattgatataataaagttcaattttgaatttatgaacttgataatttcctgttagatcttttcttttgtttaaataatggtagatgttgacccaaaggactttaaagaaaatgatgatgataaatctgattacgaatcagataaaaagaagctagactctggtaaagggcctaacttgtcattttatgagtgtccaactgcagcagcatctattcaaggttttggggaaggaagcggatataacactaatagtttagattctgaccaagaagagaactgctacgaaacagtagtaaagtctgaattattacacctttctactgaaggggggtcagtgtcattatctcaatatacgaaagcaactggtggttattttgcaggttaccaggcagttttataccaggggaatccaactttaaaggagaatcctgagcgctttttagacgaaaactcattaaattacagtcaaagtgatcctgacagtgttaaccatacacaaatgaataccgagaacttaccaacggtggaacaaacaaacccttttgcaaatcaaggatttgtttcaagcaattttactgttgaaaccagtacacctggagttcagcctacggttacgagtgttcgttctgaggccttcgtcaacacaaatgattatcctcaacgatcaagctctttgagtccattgagtaatacggttgtacaaaactcgatgttaccagctatagtggagtcctccaacacgaatggaaactactcattggctgttggaggaacttcttcgggagtatcttacgttccagagggatttgatactgtaagtttactgatatttatatacaaaatgttctttctaaatattaataatttttcagatcactgtaccaaggtacagaccggttgaggtcgttgatagaaccgtggaggttccagttatccaccatattgacacgtttgttccaaaaaaggaaattcaagaagttgagagttacgtcaagaagccctacaccaagtatcttgacaaggttgtcgaggttcctcaagtccactattctgataagatagttgaggttcctgaataccatgaaataactaaaaccgttccaaagttagaagttaaggaaaagactaactatgttcccaaagttgaggtcaaagtagttccaaaatacgttgaagttcctgtggtaaaaattgtggacaaatacgaagaatatgaagaggtttgtatgctacaagcattttatacactgttacataaaattaaattataactaatattaaattatttaggttgaggaagttgttaagcacgttgaaaaggtcgaggttgtcgaagttcctagagaggttgtaaaacatgttgttaaaccagttaggaaaattgttgaaaaggagaagattgtgccagtttatgaggtaaccaaattttatcagttatttacttattttataaattttttcagaacttaattaaattatttagcatcgcgatgtgcctgttgaaaagataaaatacgttccaaaggttgaaactatcgaacatgtaagggaggttcctagggtcgtcgatgtacctgttccttacaatgttccaaaacaccaatatgtagatcaaccttatgttgttccaaagtacagagacgttccggttgctgtaccagtgtgcaaaaccgtgaagccagtttatgaatacaaaggtcctaccaactacgttgatgttccagttcacaaaccctatttcgttatccatgatcatctcaatttcaaacctgtaggtgcttttaacggaaagaatgatggatcatttactgtggataacagtggtcctttcgttaccggtactaataccaataatggatttaatcctgaaactacattcactccaaattctaaccctggtcactttcctaacggtagtttcaacgttacagacaatttgaacgaaaactttggaaattcagccgtattaggcgagtctgtcagctacaaggttgttgggatgagtaaggtagacttggataagatgaatttagaggagaagaagatggctcaggagaaacttgacgaagctcttaacaatcccaacttccaagtttacaaacagtccctcaaaactcccaaccctcttgaaaccaacaacaataactttaacactccaaacttcacctttactcaacctacaaactttaacttttctcctaatactaacaatggtgcttataatacttcttggaaccctcccaacacgtcaagtccaattttcactaatacttggaacaaccctgcacccaacaccaacccagcgacagcggccaatgccacaactcaaaataataaccctggtaccttcgaaccttcaaacaatggcaattttgacaattctaagaattcaaatcctggcctcagttggagtaaattcggttcattttcaaaggggaacgattcttcgtcctggtcaaagtggagtccagaatttggctctagatacccctcaggaggctggaataactggaacaacaataatttaagtggtagcttttttgaaaataatttgaataacaagtataagtttgatggtaattattccagcaacaacttatttaactggaccgacaagttatttcagtttttcaagggctcaaaatcgcctgagaactcctttaactctaataataaccttcagaaccccaacaactttaagtcgtccaacaaagctcctacctctactagagataagcctgttagcaacaactacgttttcccaggcactggctcaacaaacaatgtttggaccaagaataactataacttagttcaagaatctttcaggaattggaaggtccctaacatgcatttggacctcgagagaaacactcccactaacagggcacttttcagagactccagggataattaccacatgagtagcggtagtggtagcgtgggtcacagggctcttaaaccctccaacccatatcctgcatcagattccaacactcccaaggttcactgatttaattttaatgtaaagtatacttgtcgaattgtacatattagtcattaatgagtttactaatacatataattcataaatgccatgatagcgacctttcaattcccaggttccagtacttaatgatggtggttctttgttcaggtgacattgaaggtgtccaaactgtattgtttgctccatttgtaaatttcttcacttctgtcaacccatcccacaacttagcttgtagtcctgccaacagtgctgctccaaatgatgtgatttcggcattttctggtctttctagccttgtatctgttaaatcagatatgagttgaacgagttctgaattctgacttaatcctccatccacattaatgtaagggattgataataggccggtatcagaaagaaaagagtggataatctcgtaaagttgtagtccaatgctttcgcagtatgctcttacaatgtgaccacgttccgtgtgctgagtcatacccattatgcttcctctggcatcatttctccatctcggtgcaaacaaaccgctaaatgctggtgcgaaaaccacgccgtctgaggacttgatctttttcaatatttcctattagtataattctgaaatctaattaatgcttactgagatctctgaggggtctgataatagtcccatatcttgtaaccaggtaattccagctccggcaattgcgatggagccctatttatggttgatttttgataattattgttaacaaacctctagtgcaaacactgttggggttgttgggctcaatttataacatggtgtgcatagtaaaccaccggttgacatcacttttttcgaacctaattattaaattttaacattttaagtacctgtattcgtcaagataaatgcccctgttccaaacgtgcatttagttgccaggttttcaaataatccctgacctatgcaggatgcttgctgatctcccgctgatcctagtattttaactcccttaaatcctggcaccttatcattattaatagttccaaaatcagaacaatttggtcttatttttggaagtaaattaccagttagtccaaatattctacaatttcatatattttctaatataaaatactttagcatttccgtagaccatttttcagtgttaatatccattaagaatgttcttgatgcgtttgtaatatctgtcaagaattcaccagttaggttctaatgtaaattattttaaacttcactcacatatatgatccaggtgtctattgttccaattcttacggattcttctctaactcttttatcaaaccagtccaaattattcgacatccacttcagtttaaatgctaaatttagatttaaatccaatttacaaagttacctgaaaagtatgtacttatcaataatccatttatgtgatagaaatggcggtctgaaccatataattcaaccatattgttagcttctgtgctagctctgatgtccaaccaaactaaacaaaataattaataaacgtctttaataaatgcaaacctattgcgttatgtaatggttttcctgtatctttatcccagaccactactgtttctcgttggtttgttactcccaagcccacaagaacgaaattcggaaccttttctttcagctgctttactgattcgttcattgtgtagtagacggaatccattatttcgttgggatcatgttcacaccatctgaatgcaataaaaactatttgtttaataccctgattttgggtggtattgagtatgtttggatttacttgatgccaggatattcatggatgagtcgtacagggtacaccgggttgattgggttccctgatcgattgatgcaataacttttactggatccatagttgattaagatgaacattaggtgaagatatacttaattgttaaaactaaactttaggaggtaaattgattcaataacagaatatcgttactaaatcaatatcaaataccagataataaaacaaattaaacaacaaaacaaaaataacagaaaattaaataaagaaagggtgataaaatcagttcgccaaagatttgttcttataaaacgtgttaggctgaaccaataaattgtaagattatttaatatttaatcttctcaaagaaataattagactaacttaatttttaattaaattctatagttattgaagaatcattgaaataattaaattattattatatcttgggaatcactactcaatattaaattctgggttccttccaccttgaaagaacatgattccctaaatacatattgaaacaaaataaatcttgtcctaccaaggtgattacgatacaagagatgataaatcctacaactacacacctgaataaacatgattctaaatttccagtaccagaaaatattaattgagacgaaagaaacccaccagacccctggatttgtattctggcatgtcgtcgacattgaaacctaaaatacgttattattgcagatttaaatacctctattgttccaacggccatccagaaaaaactgacgatgagtagaacaacttcggccaataactgaaaataatcttgatttacaatttgaatacccctgatttggtcccatatgcgttgtttattatgtaggtcaaataagaagatgggaaactctaaatatttttatcaagaaactcgtattaccaggagaaggccgacaaccagccatgtatctgaaaataaatattaaaaactgatcttacatagtggaacgtcacattccttatccctgtttagaaataatatgagtaagatgaaaacatccgatgtgagaaaaaagtaaaaactcggtgtaagctaaaatgtgttagtcccataaccattaaaaaatattaaccctaattttgaacataccaggactaaatttcagcgttatatacaactaaaaattaccttccggatcaaataaccttttcctatcaggcttcgacgtaatcgaccctaccatatgactatctctggtcagtgtgtatgtcgtttggacaattcacactttccataattttataaatgtgtaggtgaataaattttttatttttttagaaagatttaattatacttaaaacagatgtttttatggagtaatattcacaaatcttccaataaagtggtgttgaaccgtggaatcactcgtaatatgggaaggatcaatatccatatatatgtacataatatttgtcgatttaaacataaataatttgtgttatttccgaaagatccctttcggtttcttttcaaataatatcgagtatattttttgctgaggaatcctactgggtttgcaattaattcagttatgatctttgttcactgtttttaaacaactgtaccataaatataatgataaatttacccgtaaaatgccctcaaatccctagatcagccgtttccttacgatctaggatacacatgaaaatagtaatttctctgctgttgtatttatctgcctaaatcgtccctgtaaaatataatttaaacattgtgcaactgctcgtttatgtagatataaagatatatccataaatccaaattttttgtttcttatatgtgtaacataaacccattatccataaacacatgttcctgaactaggttgtattgtactctaaatgtaacataaccgcaacaaatttgaactcagcccacccggaaactgtaaaatagttcaaacaagtaatatagagagtttgaaacaaaacttaacggatgttgtttaacaggttgaaatagctaaacctgcaagtgtatcatattataaacaaatgacgtgtgtattataaaatagtcgacttccccattgatggttttgtgtaaaaaatgatccaatggctttctgtggatcctcgccaaatgttccaacctatcgtattaaatttatacacttcatcaaacgtagcgggaaattcataaagctgataatattatttccattcaagaggaaaatgtatagttgtaatgacgtaaggacaagtagcagctgtaaaacaggttttaaaacaaaacccagcatgaatactctggtaactgaaggtcattgcaatagtagttataacaatatttgttgcaaaagtagcgtaggtagtagcagtaaatctatcaccaaatgcaacgttaaggttttgaaaagatgcctaaactaccgccgtagtaacacagcggattctttatgttgtaatcgagttagtgattttgaagcttgttctagagagttgaacctagaccaatcctatagacaatatccctcctttaaagaaaaacaaaccctgtttaagaattgcaaaagagatgactttgaaattggaaagactatcggcacaggctcttacgcaacagtctgtatagccaagttcactccgaataatcgctattttgatctcaccagatatctgtatcctgacatcagggaaaacgtgaacaccagtttcgcaaggtatacatcacaggattctgaacaaggatactataaccaaatacatgatatagaaaaaccaatggaacctaacgaaaagatagtttcattgaaaatactgagtaaaaataaaattattgagaagaggcagctggagcacgtgaaaaacgaaaagaatatcctgagcactctaaagcacccattcatagtaggatacctgggaagctttcaggacactctaaatttatatttcatactggagttcgtcccgggaggggaactttttacatacctaagaaggatgcatacgtttccgccagaatacactcgcttctatgcatctcaagtactccttgcacttgactacttgcatatgaacaagctggtatacagagatttgaagccagagaacatccttcttgatattatgggttacattaggctggttgacttcgggtttgcaaagagactggagtctggtaaaacatatacagtgtgtgggacatgcgattacctggctcctgaaatttttctaaagaaaggccatgattttagagctgacttctactcatttggggtatttctgtacgaactgctgactggagtccctcccttctactcaaattcacctcaaaaaacgtataaacttgcgctgaataatgaagtggcctttggcagaaaggtgaataacgtgagtcgagacatcataaagaatttgcttcgagtggatccctctaaaagacttggaaataacgttaaggaagtttatttccaccctttttttgacggaattgatttcaacatgctgttggcaaagcagataaaggccccaatcgtacccagcgtcagcagccacgacgacgtgagtaattttataaagtatcccgagtcttgggaccagtacaaaagtgaaataacaaaggagcagcagcaacttttccagtttttttaaataattaatttgttacgttgttgatatatagtatatattaggttttggggttttagtgtgtagagtaggtagttgtactacaggatcagtagatagtaggtattagacattctgtgccagttaatgggtactatatattggaagtagtaacagatagcaaataacagtaagtaaatattgagtactagataccgtatgtagaaattcaactacatttatttaacgcaatagtttaaacttagatttgttgtattgtttgttctttttgttagttttgatcagctggaacttgtttttgtagtccatttcagcgttcctcaagctgttacagcactcgtcatatttattgtacacctcctcctcggaaatatcctaatgaaataagaaattggaattagatgtttgctaccttgtattcttcgagttttttgtttagagcatattcagttctttgaaatgactcgatatcgtacctaaagaggataatatgtggtggtggtgtcttactgagttattagggttagggatatgccagatttaccagccctggcagttctgccaacacggtgaatatagtctttgctggtgtttggaacgtcaaagttaatcacaagatcgacaaaagggatatctaatccacgactaccaacatcagtaacaactaatatgttaaataagcctgaaatgatatgaggttgtgggattggttgtagtttacctgttttgaatgaatttagagagtttaatctttgaatctggcttaacttgccgtgcaaacagacctaagaatatttataagaaactttataaaaaagacttacagatttaaaagataggttctgaaggaaaagagtaactttttgagaagtaaggcaagtgttacaaaaaaccataattgtactggttgaatatttccataaaatacacgccaggtatgtgtatttaaatttcaagggaatgagtagatacttttggattaaatgttcgctggtgtggtatttggtgttgacatttatctaaaaaataatatggtggtgttttgtttttacttggattggcttcattagggttactttttgcaactttgtaatcttactagtcatagtcgcactgtagaggtatgtaactttatctttgggtagactctaaaaggtatgttagtggataagttgtgttacttacagttatgattttgtttaaagagtcgtcgaaatcagttgaaagtagtttatcagcttcatcaaggaccaaatacttgatagtttctagggaaaatcccttggtgttttgcaaatgatcagcgattctaccaggagaaccgactataatgtgaggtttcttactcaactgtagagcctgtgataccatatcaagtccaccaaggattaaacaaacatctaatcctatttcagagcctaaggaaatttttaactagtaatcatcagttacctagagatattaactgttccttgatttgtagagatagttctctagttggagcaagaattagagaaaataaacgttgtggtttctcgagtaatttctgtaaaatagggattgtgaaagctgcagttttcccagaaccggtttcagctaaaccaattatatccttgccagataaagcaattggtattgcctcgatttggattttagtgggccttttccagccaagttccttacaagctctgcaaagttcaacacaaacacctaaatcctcaaaagttggtgtatcgtcatctttatcatcatcttcttcgacagttacagccattttacggttaattgatgacattaagcgagatttatatttctctaactctaattctggatcagaatcagaactcattgtgataaaaacgagtaaattagtttatatttaggttaaagtgttctataatgtgataatgaagaaataaaagtgaaaaaaattgaagaaaggtcatgattttaaaagattatacagattatgatacattaatgattaaatattttacaagatttttaataaaaataattaaaatacaaattgcgataaatttaagtcaaatttatgaataaaagcttgaaataaacaaggataatggttcaagattcagaaaccaaagtatggggaataaagccaaaaaattaacaataaaaattagtttatattattatattgtgtaggaatcctttttagtattcctttttcattttatataataatttctaaccccaactaaagtcatattcctaattttaggaataccagtgttgttacttcattttaagttataaacaaatagtataagttaaacttatatataacctgatagatttaacaaaaattttaaaatgtcgacaagtaagctttaagaattaaataattattaatagaagtgaaacaagatccaacaccgatggaacttgacaacaaggataatccggccggcccgttgtcaatcttggaggaatgtgtcagagaaaactgccaagtcctgataaactgcagaaataatcgcaaaattctggctagagtactgattctatccgtattatagatattgattagttataaaattgttaacaaaaattttaggtgaaagcttttgacagacattgtaacatgatattaacaaatgtgagggaaatgtggactgtaagaggcaaaggaacaggaaaaaagaaactggaaaccaaagatagatttctttccagactcttcctaagaggagattctgtaatcgttgttttaaaaaatccaaaataaattatttaattcaatgtgtaattttttaatgacaagttacacatttattttacttttttgtcattaccctatacacattcctgaaatggttgatattctaccaataacccatatttaaatgtataatttgtatttttaatattatttatgtgtatttcaatggtttgatggatttgtgccatattattgagtttgataaaaatgacgaatcttcgtcatttggtatttcttgaaaagaaactagtatctgtggaaaataaaggtaacaaataatttttaacatcttctatatattatatattggttatttcctgaaactcatattcgagattaatcatttattccgtagatggagctaatttgagcattggtagcatcgttgatgttgctggagatgaccactttatgttcctgttggaatcctccgggatagtctggatgtgttataggccctgggttaagttcgatgaaacaactcacctaaggttcgtcagctttaaaaccttcgaattcgaagcaacaaatgtgttctattgcccactaaaaaaagtattggtagtaatagggtaagtgatatattatactatagaaattttcatataaaattcttaattaggcgtgagcaagaatgtgactctatcctaaaattcaacagttatgacttgtccccgtttaatgatggttatgaccatacccctcaattcatccagtcaactcctttgttccctaatttgaatgagttccgccctgataacgtagttaaagtggcaatctcagatgactgctcaaccatcggagtctcaacagagttcaacgggatatatatgtacagaaattatatcactccttcagatgatcagaaactctgggtaataccgcccaacaaagtgtttaaaatgtgcgccaagaatgtcgatatcctagatttagagggttcgcagtacctttttattaccacagactttgaagttgtgtcatacaaccttagtgataacaaaatcgtatacatggaatcctctgatcttaagtgtgaggcttcatgtaagctaaaacagaatttagtgggagtgtatgtaccaggaacgataatgatataccatatactagatgggatggttaaccatatagatacgaacgccaacgatttagacagtagtaacagtgggattgataatataaaactttattgttataatgagtatgtggtgaattgcaatgtggataacatattcgataacaacaacatcatactcataaatctatattcgtacctcctagatatctcctttatcgcatacagttactacatcccaagactaatacacattgtacagtttatgaataatctttatttgtttacaacaaacagtaacctaaacaatccaaacgggctgttctccagtgttctgatatttgaattgaagaataagaagctgtacaatagagttgatatcctgataaagaagaggttattcaactgggcagttaaacttctaaagtttgaaaacaggtcaactaatgaaatagagcagatatacaaaatatacgcagactggctgtacatgaaaaataaatacaacgagtcgatttattactactctaagtgcaacaacataattgaaccctgttatgtgatacaacgttttctcaagttgaacacaaagacttacctttacacctacttgtacaattacctgtaccacatgaaggttaataaaaaagcctccattgataataactattacatattaactatactcttgctgcagtcactgaataacaataatatgcaaagacttgaagacgaaacaaagtcacaagataatgaaggccaggaattagcagtggaaaatgaactacatagatttttatcgaagtttagtaacatatacaaaaagagtatcaaagagtctattatacaatgcagatatataaataagtatgaattcgcatgtgaaatcgctaagtatcaaggtgacgaagaggagtatctaaacatactgattgaagaccttagccactttgacaaagcctacgagcttttacaatctgcatccaacagcgtcaagtataacataattattaagcactctaaactactccttaagtatgactcatctaaactattacaactgatcgacaccattgttaacgataatcaaaaggaacttaattacttacacgaaaattccacacaaattaatgggtcttcaaaatgtcaatcaaataatgctatattgaatataaacaatgtgttgaatacatttatattagaaaatgactttttaactaaattaattggtttgttaaacgataacagttccctactcttgtatactattaaactgaatattttactccaacagtataataaatataaacaagtttataatactcaagacaaggatctttctaattctaatgatagctcgcataataatgtagataaaagtgttcaggtggaagatagcatacttaagctccttaatagcaccagtaattactcaactgagctcattgggctggtgctatgtctactctataagtacaaaagaggctcaataataataagcataaaaatgagatattataacctccctctaattcttttggataacgaggatgatataatcagcttgctggattacgtttacaactacggttataatgaaccaatactctacataaacatattgaagctgctgctcaagtaatcaaatttattcttatcttttcataggcataacaactacatcgtaatcaagaagctgctgtacaatgttcaaaaattactaaaatttcaaaatatcataaagattttcaacaattaccagagtattcaattccaatacctcaacgtaaaacctaattaactgtctacttacacacttgataattcttaggactacataaggagtgaatttaagaagataagtgacacgataaatgagtacaacaatgacataatgcaggacaaggtcgaatatatgaacatgaagaagaatctagtggacctgaatacgaattacatcattatcaataacacaaactgctcttcctgcgggttacacctggagtatccatcgatacacttctattgtaaacactcatatcatatatactgcgtaactcaggataatacatgtccaaaatgtacttataatataccggtaagctctaacctaagcataagtttttaggacgctagcgataacgatgataatttctttaaatttttaataggttcaaatgacccgtttgactacatatctcagcattttaataaatttctttgcacataaaaaaataagtatatggtagaagtaggtattaattggtggggactgatccaacacagagtgattgttagtgtttgtgtatcacatttagatatagggtgatgcatagtaggatcagattgcggatatcaaacgaagcttgggaaaggaaatcaaaaagtgggcaaggaacagctgaattcaagagggcgttaaatgataagcacgcaattgtgttctttttcgtaggtatggctgtaaatctaaacctcgatacaagtctcctaactgaacgagtttttgaggtggaaaactttacgaatattactatttttctatatttcagtgtcgtcgtcatagtatgcattctttacatgttcttgatacccccagatttctggcaacttgtagccggtgtgtggacgttatctgcttctcgtttttgccaccttcttctgtctatatttgctcacggaaagtctgggagaaatttgtttttgttgttttactcaattaatggttttctgagaggaatcatttcacttactagtaagtatatggttttaaaatacctttaggctcacatgttataggggaatactttttgattgagtcttatattcactttattaacggtagtgtcttcttctcaattttgtcctcattattgcaaattatagtcggtcttatcatcggagatgaaactgttcgtcaagtacgacgtaacttagttatatgtcagagtgcgtatctctctgagacattatttgcatcaatatgggttacaatcatcttcatagaatatcattcagatataaataaagcaaaggaagaacataaaaaaaatgaagaaggacaaaaatactcacaggctattaaaaagtttacatatatccgatattacatttctaagttttttgtttcgttttttgcatctctgtttcgtgttgttttccatcctgtgttaattccatatatgatggatgtaccaaacgttaacaagctgttggcttctatcgtttttacattttctgagtttttgggtagattaaccacatttcaaattgatgaatatatcgatgccagtaaaaaggcccatgatatatcgaatactatatttttatttagacaggacttgcacttgtatttgttgttttgttatcaatttatcatctgtacattagctgtttactccacatggttccagaaatatggaatcagcaagaatccatactttgtaactttcataaccatgacatcaggactagtgtctggttataatgataacagagccgtccgtggttctgaagctgttctacattactatagtaaaccgaaaaacataataacttctaaagacgagcaatcctccagctctaacaattcaagcgacattacaccagaaattgcaaaagatacatccaatgttagcgatgtaattacactactaagttattcttcctttttggtaggatgtttgatttcatactatttacaacatgcgatcattagacgtaaggagaccttggagttcatcattctctcacacaagaagtacatagataaagaatcagttaaaatactggcaaaaaaactaaatttgtaaattcattgttttaaaaaaattaaaaaatcaaaccgttcaaaaatgctattcaaccttcctctaatgatattttgatatacacatgatttgttcaagtatttgtttaaaaattaattaaagaaaatttttaaaaaaatggaataattttccaaaaacttataaaatagtaacacattaaattcttttacgaaggtggggaacaatggaatataaaattgttattaatgattgtgtatcggatctcgatacaaaatgttgcagagtagaatccgattacggatggggatcgatgcaagggagaggaaattgaagcaaagtgagccaggaggatacgcatacaggaaagcgatcaatgataaacattcgattgctttctttttcgtaggtatggctatgaacctaaacctagatactagtctgttaacggaaagagtttttgacgtggaaaatttcacaaatattaccattttcctctacttcagtgtcgttgtcatagtatgtattctttatatgtttctaataaacccagaattctggcaacttgtagccgccatctggacgttatctgcttctcgtgcctgtcaggttgttttgtcagtgtttgctcacggaaagtctgggagaaatttgtttttgttgttttactcaattaatggttttctgagaggaatcatttcacttactagtaagtttatgttgtttaacattacctttaggcacatttgtcatttcgagatattttctgaatgattcttatattcactttattaacggtagtgtcttcttctcaattttgtcctcattattgcaaattatagtcggtcttatcatcggagatgaaactgttcgtcaagtacgacgtaacttagttatatgtcagagtgcgtatctctctgagacattatttgcatcaatatgggttacaatcatatacctaacatatcgaacagatcaacatccgaaatcggagcaagaagaaaagaaatatgaaaaggctatcaaaaagtttacatatatacaattttacatttctaagttttttgtttcgttttttgcatctctgtttcgtgttgtttatcatcctgtgttaattccatatatgatggatgtaccaaacgttaacaagctgttggcttctatcgtttttacattttctgagtttttgggtagattaaccacatttcaaattgatgaatatatcgatgccagtaaaaaggcccatgatatatcgaatactatatttttatttagacaggacttgcacttgtatttgttgttttgttatcaatttatcatctgtacattagctgtttactccacatggttccagaaatatggaatcagcaagaatccatactttgtaactttcataaccatgacttcaggactagtgtctggttataatgataaccgagcagttcgtggttctgaagccgttctacattactatagtaaaattaaaaaaaataataatagtacttctgcctcttcatctagtcgttcctcctccacttctgacaattcaaccgaaattacacaagaagttgcatccgatacatccaatgttaacgatatcattacactactaagttactcctcctttttggtgggatgtttgatttcatactatttccaacatgcgatcattagacgtaaggagaccttggagttcatcattctctcacataaaaagtatatagataaagaatcagttaaattactggcaaaaaaactaaatttgtaactttaacatatattgttatttatttcaaaccttatatttcatcaaaaaaattcggctgatcgtttgacaataatctgttcacctcttcagtacttgtcaggtaaatatactcaaaattaacaagaaatcctaagcgaattaaactattattaatatacctaatagagaattgttgtggttgatggttagggaatcagttgatctaactttgacatcaaggtttttgaattctttaagtttacctaggaccttattaggtaacaactgaataacgtatatttctccgtcatctccacatgtacaaactaagtcctcatttatctttacctaggtgaatcatgttgaaatagtaaactaacaattccatttatagtctccttgtttactggaataatatcgttaaggtcgccccaatatccgtaggagaaaaaacatatagaaccggtagaagtcccgcaaattactttctttcccttctaatacatttgtcaataaacacataagtaccttaacaagggacatggtcaggaactcgtgttcagtattgtctgaaagagccttcaatttgaactttctatggtcaaaacagccaatttggtcagcactaaaaggtatgaattagtgtataataccaagttgcgataagctcattaggatcacgtccaaccataaggtctgtaaaataattaaaaactgttggttaccggtaacacaatcagaaaattcgttaattttcccaatgcatgaactctttgccctagtgtcccaaatctattaagatttaacattgaatgtaataccctaatttcgccctcatcatctcctgataccaggatagattcgttgatatagcaagcgttgttgattggatccctaaattattcaattaaacataatgtgaacatacttgtgcccctttccaacccattttaccttatttgagtcaaaatccgtgagagaaacagtcttgtcagaagaagccgacattatttctgaatttttgtaaattcataattaattcacagttgttttatagataaattaattttaatttgttatttagcttgtagtttgttcaaaccctttccattactagaaaatttggagattctaacagaactggaatgtgtagaagaattggaccattccttgactaactccctactaatttcctcaaacttgaatctaaaattaattaaaatcaacaagaaagattacatatcgagttgaccgctaattgatccagaaaccagaagatcaagcttcgggtgaaaggataaacaattaagatcttcgtcagatttaaaaaaacatgtattcattggtatataaaatattgcatagaaataatatataaaattaatgccattttaaatcacccttaggtatcgttccaacactaccatcctacgcaaaagattagtgaaatttttaaaatttgaaaatatataaaatttaccagttttcttgccatacaggcgcctatagatttcatgagttgagtaggatcgttagcttcgcccaaatttttgaaccaaacttctattctgagaactggaaaacgtgagctgagtttgtcgactagtctaacgccattgataaactcgcaaagtggaatcgttgatcccacaagtcccaaaataatgttattccagtactcgtccactgtgagctgttgtacatctgttggcctgaaacggtaatcgaaatgacctccgtccttgttcaatggatcctcccacataggttgtactccatcccttaaaatagtttttaggttaattagaggggtacctgaacaccataatggcgtcaacaaaatgctcagaaccgtcggaacattcacgtgccaatcttttattggtagctaattcactcggttgaggaatattaaaccataaattccaaaaggcctaagttatttaatctaatttaatttaaaattacttgtacagaatcaaatgaaaccaatggttttgtgtgttctttataatcattctgggagtgttctggcatcttaactatctgctcccaaatcacccatttattcttcaaggacaaaggagtatccaggtttattgtcgtctaaacagtacattagtaattaattaactagtaaatatatcgttacagattcaaataattctgataatttagcatggtcttctgtattcttgttaaaagttaaagacggacacttttttgtgccattaacagcaacactagctgactctgccattactttagacagattttttaagatttaagtaaagaacaatttctgaaccttacaggggaaaaattatacaaaatgtggtttagaatcaagtaaaaaaggatatcgatgagtaagtaacgtctaataaagttcagaaaactggatctggatctctgggttatttttaattttggaaatataagggcatttgggaatttatattaaaagtttagtgtaagaaagttatacttactctgatgaagaaaaacagctgactccccacagggagtagataacagaattaaaaagcacacataccactaaatttgaaaaataaactatcataaaatattatttgttaggttaattctattcttacttcctttttttgtaaaatttgaccgtttctttgtggatcacccttttttcactaacatcttccttaaacttttcaaatttatctcccatagcttcttttagcttctctaaaaccttttctgacgctaattgaagtggaagatccccttttttgttataacattgtttagctcctgcacatttttccagtcgaatattattattaattatattacctttggttattagatatagagcacaatcgacattttcattcatggccgccaggtgtagctttaatattattagttaatatttaattttattaaataatattttaactaatttcttactggtgtcatacaactgtttgttttactgttaattttagctccatgttttttcaactaaacatttatggtaattaaaatcacttatgaaagtcttacgaatttgagaacttccaaatggcccttctgagctgcgaagtgtaagcatgtcattccatttttcgcagggctgtgcacattcgctccgtacttcaccaagagtttaacaatttccaaatgtcctataaaaggctaaaaacaatgaaaagcgaaaccttcgtaacatgccaagtggagtggagtcctatagtataaaagtgaattaagtgatgtttaaatattagtattttcatgattatttgtttttattaaaatacctattaaatgagtctcttttatctataaaaccgggatctaatttgaaactttcttttttggaatcaccttcatcaactggtttagtcagttctttattattttcatctgatttttggccttctattaacccttcatcttttgataacacattttcatccttttccttattatcatcatcagatttgctctttagctttaaattttgtttataattggtacttagtattttttctaacaatgtataattattttcccttgataaattatgtaaagcactcatttatattataaaacgtaattttaaagactatattacatcttggtctaaaatttcagactgtttcttgcgctgaacatcccacaatgatttgtaaaacccgttcagtttcaacaactcctcgtgttttccttgctctatgatctcccccttgttaagcactagaattaaatcggcactaatgatggttgataatctatgtgcgatggtgattgttgtcttcttgttaatgagagagttgattgtgttttgtatttgtgattcagtcttcgagtccagtgagctggtggcttcgtcgagtatgattatcggtggatttttcaagaaacatcttgcgattgagactctatgacaaatattaataaaatatagtttaaattggtaaaataggagtataagtatctggaggtattgtgcggtatgagtgtgtaaatagctggcagtagtatttttattacctttgcttttctccacctgataattttattcccctatctccaacgagggtatctagtttatttgggaattccattactctatcgtagaattcagcctttttcaatgcctcgtaaacctcgtcatcggtagcatctggcttcgcgtacctcacattatttcttatggaatcgtggaataaaattgtatcctgagaaaccactcccagtttagacctcaaactctcttgtgaatattgtttaatggactttccatttatcaacacctcaccccttaatgggtcataaagcctgcataataacctgaaaatagtcgtctttccagttcctgttggtccaacaatggccagtgactgatttttactgagtgaaaagctcacttttttcagtatcaaattattcattggacaactatctgtaatgtaggagaaggtaacgtcgcggaactcgatcaatggatcgtgttctgtgtcgaggtccaactcaacgcagtctggagaatcttcgacggtactctaaacacatattgataaaaatattaatcttacctttattttcaagagatttgctgcatcttgaatgcctacgaggccctttattatggtactatatacggttcccaatatgtacagtggtttaaatatacggaataaatatgtcaatataacggtgaatgtgccgattttggttttatcctttaaaatctggaaaatccccatgagtaaacacaaaaatgtggttgtttgaaccacgaaatcctgtcctatattgatgagtgatagagagttgaggactttataattgaagagttcgtacaatccaactgccttggcgtatttggcgagctcgaacttctcatttgtaaacagtttcactgattcgaaattattcactgagtcactggcaatcgagtgcatttcgttatccttgtcgttttgcgcttctcttgtcttcatacgccagttggtcaccaaaatcgttagtgtgaaatagacaacaagaccgactaacagtatgattccgagtaagtagttcctgtatacgctgaagaacactataataattataatcgactccagtatggtcggaaccagtgtgattattccaaattgcgacagctctctcatgctctcgcatcctctatatatggatctcacgatctgtccagctctggacgttgtaaaccagtgataattcagggagtgaacgtgcttgtatagcttgagtgataaatcatttatgcatatgaattgaacctaaaatatggatgagttgggggttggttggagggtcatatctagttagttaataatttacatatcgatatgtgaagttcctcaattcatcgaagcaaattgcgaaaaaaagcaaaagaaagtataaaaacaaatttattatggtttcatttttgttcctcagcaccaattgatccaatgtccatccaatgtacattggggccaaaattgacaaagctttaccgacaaacaacgagaatagtgataataggatcaggaaccttagaaatatatacggacgtgaagtgagatctgatttttcaggccagaagagcggcttgatcaactaaaagaagatgagttgtgtttaaatgtacaatgaatagctgtatgttgtctgaattaccattaaaatatctttttttgtggcttcattttccaaatcattcacagttattgattgatgacttgaaggcctgtttcggctgtagcctagaacgcattgacccattctagtgtaatgttgtgagttaaaatgtaatgtttttcttgaatttttaaaaatactgtggttattttcacctttttattctattttacaaaaaagagaaagtctatggtacaggttttaaaatttttattccttcgaggaaaatgagaaatttctgaggctatattacaagattattttaaaattgaccagaatcggtttaaattttgattttaattctaattttaatgattggactgtaataaagtacagaaaagtatgaatgttcgacatttgtattctgtacgtatttgtactttaaataataaatatttgccattttggagaaagtgtacatttaaggagaaacaataataaatttaagaaaattagtagaaagtgaggttatatactgtgtgagtgaatgaattaaattagtcgttttttgatttctttttcattatttgtgattatgtttttaatatattggaggccgctcttgttatatagtattaaatcctgaaaaacacttggaagtttgtaccacatacctggtaactattcattttggtattcaccaatttcttcagtttataaacattgatattatttaataaataatatttgacattaatctgtaatatgacgactgaaacgtagaggagaatttcggcatttaggatgtaactgtccactgcgtcggtatgctccagtaaattagtgataaattccagcaactaaaaattatctgttattttatttttaccttttgcgtgtatttattcggcaatgcgattattatgttatatatcacgttatggttgatgttattcaggacgttgtagaggatcatatttgtgttatacgccactccttcatatgtaatcccaccaattgtgatattatcctgagtgattccattctccattgtttcatcatccagtagctaaaaatcctctaaatttataaacctacgttgatgatgttttccgttacgttcaggttatagtttaagtttccaaatgttttcatgttctctatcttctcagtctcctcctcgacatatataatgtcatctgacagcttgtactttataatgcagcttgaattattacctaaaacaattttcagttaaattcttgtaaaaatctatgaatatgaataactaataatcaataactgatattgaataatacttgttaggaataaatattggttgtaatctgttagagctatattgttgatcgtaaggttgaagtcgctgatttcagttatcattacgtgcctgtcgcagtcatagattttcatcaccatgttcgcattggtgaaaaccaggtaatgtgtcaagttgataaacttaatctgaaaaggatgtcaatgaaatgtttaaacaggtattctggtgaactaatgtaaatgtataaaaataaataaatgaactttgtacttgaatagctgaacttagtgtgtaaatagagcatctagttatacttgagtaataattgaggcgttggttatggttttaaggatgttgccatattttatggaccatatcttaatagtcttatccaaagacgctgaggccaacatctgaacgtcagatgtagcatccaaactagttactagcaaactgtggccgtacaacattaggtgcttcctcatgttatcatagtagtatattatcacattattatccacactcaagtacatgtatttatacattgcgtcaatctaaaattactatttcaagtgaaattttatattaaaagtaatttataattaaaataagaaatattcataactaagatataatttataacttacaactgagtggtggatttggtgttgtacattaacgtagtggaagtcatttttatacttgactatgaaattatacttatatatcaggaccaactcatcgttatgtatatatacgttgttaattgagttattagtccctaacattgaggtgaaatcctcgcccatttgtaaatttaagctgtttgcgaccattgtgtttgtattaaacttatacagtctgttatcactagttactaccaataaattctcattgttgataaaaatgacattgtttattgtgcaattttccaaaactgcgccatttgataaatctatatcaccgtcagtagatgtactagtttcactactcgctggtctaatacagctcgaattacttgaattattagagtttgtcaggttcagtgttttgatgatattattagtattgatattccataaaatcaacttatcatttgataaggttagcagtatcttattattcggcgataatctgaccaactttatgttatttagatggtataagttcatttcatacaataaatcgaccgttacaacgtcatcctcaagtgacactctacttaatgatacagtattattcctatttagggtaattatattcctattattaatctttatgctctttattgtatcatttatattatgtatgtgtaataacttatagtaatcttcctctgctactccttcctcatcaaattcctcgtcagctattgtactatccccagcttcttctgatttctctgttgtattatcagtttcagggttcatattaagttcttgtttatcgtcatttggcaatcctttacctccacttaaattgcttgataatgaattttttagatggttatactttgatttcagcgtggaaagatcatctgactcgataccttcttccaccggggtgttaaggttaatcattttccaaatttttaacagtttgtgaattttagctttaatactttgttttagtcgtcttagtctcttttttctcttttgtgccatttcattgctgttcagcagcttgtagaggtaaatgcacttttgaaatgctactaacaacaacacagtttctccaaactccatgtaatccactgaaacgcacttatcattggtgtacttagtttttacactaaaaaggaactcaattgcattcacttcgttcagtttataacattttattacattattattagtaaagcttgcaaacagcaatttctgaaaatcaattaaagaaaagatgaaggaagaggtaactgtaataagttgaatgataaaaactatgtaaatactcatattgattttaatgtatatacttacgttgaaatatatagcgttgttgtacaacaataaaggctcaatagtagtgtttattggtgattgattgggtaggtcccagactttcattacattgttgcaggtagttatcacatgatcatcagttaccggtaatacgttagcaatgggatttgtgtgtcccacaagcttgtacagtaactgacagttatatacatcccatacaaacacattgtcatcgttactacccgagaataaaagattcccgttatcactaaaaaattaatatagaaggtattttttaaaaactgaaactaactagttattataatgattcttacgttaaaactgtaattcttgacttgtgtccgatcaagatatgatcatcgttaactgtgtttccatcatttactttactgtttacacaaaatcttctgattaaaccatcgtaatatccgacgaatacatagtttatatcatctgagattcggttaaagcttgatatatcatctaaactgttagaatagccattagtactagggtggtgtttaaccaactggaaggtggtaacagtaaaaatattgtaattattgtccggcttgggcaagaactttgttttcacttcatttaatttatagttgtacaaatatacataatcaattgtgcctaaaacggtatgaaacttgtggaagtagagagtgataattatgacttactggttagaatatgatctggtccaaaaaattctatggatctgcagtatggtgatgaaaatatgccgaaggaatcctctttgacgtatcttaaataagatttcaccattggcctggcataatataaaatgattatcagatcaacacaacaaatggtaacaacacaaaataaattttaccaattaaaaaaaacaatttatccaaaatataaaatttttaattatttatattttcataaaatcggtttaaattaaaatcctgccttcttcaaggattcaactttattttgttgattttttaactttccaaactcaagttttttgtttcttttattattttacttattttatttagttgatatttgaaaactcacttgcacctttttaaaatgtctgtattagcgggtaacacttgccatggtatctactgatacacatttgctttttatgtaattatgtatatagattatttttaattcgatgtttataatatatattttaaatcgttgaaagttggctgaaaatgggcgattcaacagacatattacctgattcaaaacatgtagctgtaactgataagactaatacagttgaaaacaatgaaacatcaggaagtactgatataatgaatgaagtaaacgagttatacaatgaattggaagaattatatgactcgttgacaaacaattacgctataagaagcaataacggatgtgttggtaatgacagacctatcggaggggaaatcccacttgtgaacaattataactcaggtttaattccggatgagagaataaccgagctttactttaataaactaaatgagaagaacaaattgatatactgtaacaataaactgaatgaactaaagtcacttttagagggagagagtgaaccagaacaggtggttaagaagaacggtgtggcttgggagattgacgataattatctgaaacaatttgagctaaagatgaatattaaaaaacaagaagaactcatcaatagtaggctaaacaacatcaaccacaataaattagtggtttcagactactacaaactacatcaaatgaacaaaaacaaccaaccccctgattttcttccacctactaagcaacattccactcctcttaatggtgctaaggaaaataaattaactcaaactaatgataaactccctaaaactgttcttactcctctcaaacaacccaatgtaactccaactaataatattgggaacaatgctaggaataacacagttcctcttatcgtcaaacatcctcaaaatccaaattataaattggccaatggtctaatactaggaagtaaattaaagaatttaaacctaatgaacaccgtaaacaatgataacatggtatatgttaagggaaatatcatgtacaagcctaataagccttcttatatcactggaaacataaaattgcatcctcccgccaccaacaatctttctgttgataagattttcaagaaaaaagaagaccttgataataagggctctcatactgttgatagtgaatgtgttaccactcctgattctgaacacgaaattgccaacggttcagactactacaaatttaatacaatagatgacctaataaaatacgaaaatgatcaatactatggcaattctatgggccctttgcctgtaataaacgaccttaatgaaagtcaattatctaacgaaaacaaggtaaaaatgtgtaaacacaagaagaaaaggaagaagcataatgttcactgtaaatattataaaggtcggtccagtgtaagtactgcttctacaagtatagaaaatgacaaaatgccaatcaatcgtgaagtattttacaacacgagggtcatttacagctaattttaatatatttctcctctatttataataaaactaactttaatacattgctggtttatttatcataaataatagtctagatacacatgttaaatgggtttgttgctcaaataaagtattaatttactaaaatgtttaatgtttgttctggtgtataatgtattgttaaaaagattagtttacagtaattttgttttttgtattgaattatagtaaagttggtagattgtcaagtttttagctttacatagatattttagcttcattttaaacctacgtaccagataattatggtacaaacgatcgatatcttgctcaacgccattgttgaacttgaataacaggtaggtgaggtatgaataccatattttcacagtattttcgttgtttatgtataaatgtaaattctctgcaagtaaaaattaagccttctaacttactgttattatttatgtatatggtcagaaaattccatgggaatatggtcatgtccttactgggtgaattgtggtaaagctcgtatgacagcgaattgtatccaaactctactttgagaacattctaaaaactgattaactctaaagcaccaaccttgaggtgtaatttgttcctttcgtctaaaaccagctcatttctggtattcatatttagtttgcagggcttatatgagactttgctagttagtttacttttccttattttaaacatatcatcgtcgttcatgttcaagttctaaaataataaaatggtaactaaaacaatttacttttatgtacaaagaatttattatgtcattgttgacgaagtctgatttgtccatggttgccgcaagagttggtcccttatccgaagatttatcatcggatgtcccgacgttgtccatattggtagtattatcgagagttttagcggattcatttagttgtgaattaggggaactttgttctgattctagggaatttgagggaaataggtctgaatcatcggatgtcagtgaagttaaagatgtgttcgaaaattcaccaggcatattattagcaagagcattgtttaattgtgattctttttcatttagttccaattccttggtgcgtaactcagattctttaaattgaagagtagtttctctattttctaaatcagattgtttgtttgcaagttctgattccttgtcgttcaaagttgattctcgagtttgaagctcagactcaagcgagtgtaagagttcttccttgttctttaattcagattcaagagctttcaatttagactctttgttctttagttcaagttccaattgtttgaaacttgatgggttatactgctggtaagacagaatgatgtttctttgtagctgtaacaaatggtttgaattgtctaatttgttacgatactctttcagtccttcaacgtaggacattttctcctcgtttaattcattgtactttttcaacagtagcttgtaattattatacaacattaacagggaaaccttatctgtttccagattattcacaacatttttattctcacaggctctaaaggtattattatccaacacatcattcaaatcgttcaaattctcttctttaatcgttctattgttgttatttaacagcaatttgatgtcatttgacagctttattagtttacaactctcctataaacagagatgaggcgctaaaataaaaaatacgtctttcaattcggtcaaaaacttattattgaattcctaaaaaataattaataggctattatatagattttagttacctccatggttgttttcgaactaaatgataaatgcacactataactaagaccgagggaaaccaatgacactataaagacaaatactcataatatttgtcatgaaaaatgaatttaaagtcgtggaattacccaatggttgtatattcgttggaaaacgggaaattaattacacttccctgatcttcaacgagttcaacctaatactgataccagttgtaagttgaccctgaagtttcattcatttgctgtttagttcgttttcttttttagttttgaattattgcttataattttggtggtaaactatctctgttatcagctatacatcgtagaaggtaactatttgtgcatctacaagattagatataacattcctttgtatatcatcaatttaaaacctgtttaatatattttttaattagagcgattgatgtttttatcaaatttcgggatacaaattgaaacggtttccttaagaggggctacatcttacaagtctatacctatcaataatatagaaagcttattaataaatgaagtaagttgtacagtatattttaattttattttaggcgtttcttgctcaagaaattatcttttatttattaataatattaaaggattccaaggacataattctaccatttaaagtaagctgaatgattttaacttttttagaatgttagactaaaaatcgataatttgagactaatttacaacacctttaataacacatttaaactcgacaactaatttaaattaaataatttacacactactttaaccgataaaaaataatttatcttaaaaattaaattaaaattcccaagttaatttaagtaatcctagcaaacctttgagaatttcagtgaatcctaaggaaatatgagtttttgaggttttaccaagtttagatttcccgtatattcgctctataaaaacaatcggtatttcgtcaaccttggcgttcaaaagcttttcacactttaggatcatctcaacttgaaataaaaaccctaataaaattttgagtaaggaaatttacctttactgtgtattgtggttatcactttactcagtacgtccttcctgtatagcctaaaactgcctatataataattagactgctgcgaacaattattatgtatttattgataatagttattaccagttaagtctgtaacttcgggattaaataatgttttacagacatagtttaatgattttgaaataaaaattcgttgcaatggccagccactggctcctccctcacttctataacgtgaacagaccacaacatctaaatccttttccttctgtagacggagcatagaggggatatacattgggtggtgagatagatcggcgtccaaaattaaaacaaaatcgtacttacagtggcttagtccaaacacgtaggaactacccaaacctaatttcttttctctcttaaccagttttatacttctatcaacaacttttgccataacttcatccttcttaggagattttctatctcgtggtttccttttttccttggcatctgaagacttggaacttctggatgaatttttgggattatcggggcttaataagctatccatggagactaatgcagtgtttaacttctcaaattccttttcggatccatcagtgccatgtttgttgaacatagggatgtgagggaagtcatattttgccagaaaatcatttgtaaataattcctgcagtttctctaccaccgaggctgttccgtcagggctgttgtcgtcaacaacaacgatttcatagtttatgttcctaaaaatcgtttatttaatctattcttacagaggttttaggtaatagtgtatcaaatacaccaaaaatgagatgttatccttctcattgtaagtcgatactaaaattgacaaatcttccaactttttaggctctttttccataaataaattataaaaaatgtggaagaagaaaagggtaagttaaaaattaagtggtttaactataaccatgtgggaaaggtgtaaactactataattcatttatattttataattcataatttatggatttttataaagacgaacaagtgttaagtacatcgcagaagaagaaacttaaaaagaagttaaagcaataccaggaacagttggaatcagagcaacgatcaaattcaggtatcagttcctccaaaaattctaaaaaactgtatctttatgattttaatttttaatatttttccagaagttgatgttggcaggcaggaatataaacttttgcaggataaattacaggagttgggtttaaaaattcacgatatacaaccagatggaaactgtttattcaagttcgtcgttgatattattttattttgtattaataatttacttttttgcttgtaaatattaatgtgtgtgtgttcaggtccatagaacaccagctgaaatattacaatgagaatgggtataatttaccaaaattcgattatatggatctgagaagattagctgtggatcacttaaaaaagaatcaaaatgaatacgaaaatttcttagctctaagcaacaccagtaacctctacaactttataatttaatacccaatctaatcatacttacagatgaaaatgttaaaacgaactacctaacatattgtgaaaatatgttaaaggacggcgaatggggaagtgagctggaaataattgttttaactaagctattaaactgtaatattaaaatacacaactccgacaacacaatagagtacaaagcaacaaataactctggaacaactctaaacatttcctatcataaacatcaatatgtactgggagaacattataactctataataccaatttaatataaaatttatacgcaatatgtatgtgaaaagtggtataagacttaataactaagtttaaatttgatttattagtagttatttcacaagtattctagtaataaaaactaatcttccggtgtaaagatcatgaatgtagaaatattagtttattttactgtgtgccttctcaataaataacctcttagggttactggtgggggatatgggtttgttggtacctggccacgcctatccttcggcttccacttgttgtcgtaccttctaataggaggatcacatatacctgaatggtttataaagtaaaaatatgctaatttgtaatataaatatttattgattgaataattaaagttacatgtaaaattgaaattgttgtcgttcatgtattttaatgccttgttggggtcataatcagcaaaatgtaaaattttataagcaaattcgggtgaaaaggggtgccagcctggattatttttccagtttttagcacacatttgtataaattcagcaactaaagggagatataagatgaattatcagtaatacgaataaataagtaatgagtcttacgttcaaattcgttttttataacagagtcgtataatccctcctttaatttccttctgcggattttctccatttgatatggagaatacattaatcgggcccattcctgttctaaataaaaaatgttaagatccaattgttgaataacataggtatcaacttactgtagccgttgttattattattatatgaatgatcgaggaaaaaagcaggtgtgaagggaacttggtggttatatcctacattgattttagtctggaagttggagccctctgtggtgggttttttcttcttcttctcgtcggttattatcttcactgggcttttttccttattctctccactatccagttccccattcttgttaaggctcgtggtaacatcttctttactctccaataaccgtttttcgccactgaactgctcatcaacgggtttatattcgccatcaaacttatcttcttcattcttaaacttcacctgactattctccgttttggcttcattttccaataattcattatctgagcttagtttttcattttccaatctaggttcttcactgtcgaagcgagattcactagtttcatctggattcattggactttctgataactgttccttatcagataattcttcctcagataactccttattcaaattatcaccattgaattcctaataatcaattacgttgataaaagtagtaggaataaaatacctgtttcagatgagaaagatcatcttcactcaaattttgtaaactggtttcactttccacaatgtcttcctcgaagttgtttgtcattattaattattccaaatggagcattaataacaaataatgaaaaaattaacaaatgatgggagttaatggcaaaataacaaggtaattaataaaatatgttgacactataatcaaccatgcaacacatttgcatacacacaataaccggagttttttcttttataacccctaattctcataaattttaaattttttataattcagccgcgttgctttttgcctacaaagtctcaaataaatagattccgatccaactgcccctgatgttattatttgagtgaagacccaaaaatactacataaatacaacaaataatgatagaatccatatacttatgaatttttctttctaaaactacagtattcatttatacttattccgtttttatgtttcacattttctggccagccccaatattagtaccatttattcttcatgtattatatatttacttaaaataaattcacactaaaatgataaaatctgacgaggagaatcgacctcctgatcaagttgaagatgatattgattgggatgatgagtttatgtatttattgagggtaaatgacctagaatcggctaaagaggttctggaaaggagacttgtaagggatttaaattatacaaatgaagatggaaacactgctcttcattatgtttgcgctaataacttagaagaggcagcaatttttcttttaagggaatgtaaagtgaactacacagtttacaacaagtgtgggaattcgccccttcattggattgttcaaaacaaggcccttaatacattaaaagttctcttatggcatgattacaaggtcaatgaaaataaacctaactactctaagtacacacataaattcacctttaaaggttagtaaattcatacacaaatacattatagaattaacgtccaaattaagcaaggaaactctggaacactataacattaaagattatcctgaagattacagtaaggttaacgaaattgatatcaataaaaagaacgagtttgggaagagcgttttgtcagaagctttcggatctgaaaatctggaatttctccaattgatactggaacacccaatttctgctattttggatcaaaaatctgaaaatgccactgaaggagatattgaaactgacagggaagattatgtaattcacgaattccagtttattaataaaagtatctctgaccatgagaaacctgaaaaccttagtagtgatgaaaataggcatgaaaatgatctctctacagaatcagaacacaatgttaataataatgatcttgaatctaataaaggaagtttaaaagttaaaattaaggaaatgtgtataaaggatgatgatatactgaacgctgaaaatagcgaactggatgcttccggattgataatttgggaatcgagtgtaatagcttcattttggctcagtatgcttgctgggtcgaacaattattcagggcttaatgttctagaacttggtagtggatgtggtctagtagggattgctttcaaagtagcctgccagtactataatcagcctataaagttaactttaactgattatagcgataaaacagtagacaaccttaagtataatgtcgaattaaatggattgaaagatgatgtgtgtgtatcgcagttaaattggaagctatatgataagatgcctgataatgtaggaataatcgataatttagctattattccagataattcgcctggaatccactcatttggttaataaattatttaggaattgtatgatttgataatcgcaagtgatttgatttacgatgttaagttggttgagtacttggcaaacgtaatcaacagagtattaaccccaagtgggacttttttgtacacttacaagacatctagaaatgggtcaactgattttctaaacaggtaaatcacaaaatagtaataatgtggtagattaagcgagtttgggtttcaaatcgagatacaacaggtgcccaaaatatgccaacaaaacccatttgtaaacaagaataaggtaaaattaaaattttgttaataataaactttaggaatactgtttatcgttttttccggacctagtctctgatgattatatgttattaatagctaccagaacaccccatgtgtaactctaaatgtagtataaattcatgtttttcccatataattatgtataaatgtaaattttaaagtgaatatttataataccttgaaatgggactggaaactggggaaaattttaacattgatttcataaaaaggttcattggctcaggtaataaagaaaacccccgagagaataataaaaataataaggaaaatggcctaataagtggagctagtgatttaaaatttgatgattttaatttggactatgattctagggatttatcatctttagaatcaaaggtggatgtgtacctctcaagaataaaagagcttgacacatccttaagtgaaggtaaaataattaatatttattgattaattctttcaatgaattctaatttagatgttaataaatacgaagttttaaatgaaaaggtgcgagaatttgtgagtatagagaagcttcacagatgcggagcagacaaccgtcatatctactttgctgggatcccattatctcatagcttggaggttttaaagggccttaggattcaaaaggagcagcaggaaagaataaatcagctggagtctaaagttaacgagttgaaccaggagataaatgagttgaatgaggagaagcaattacatttctacaagtttgaaaaatccatacacaaggcactcaatatgggcctggcaatacagaacatgctccggtaagaataataatattttatattaattatttcttagtttctttgaacgatatgacaaagtcagaatgaagatgttcattatcaaactaagagccaaaaactatgaatcaatgaaattgaacttgaagaggcttgagaagtataagttaacagcgtttacaaatgtgataaataaaatactgaaagttaaattaaaatattacttaaatcttttaaaggtgaaacaaccttttgaaaaaacaaaaaataacttcactccaacaaggcttaggccaactccaagtgttaaaacgcctaaaattgaccctgatgtaaacgttggtgaagacgttgaaataaatttattaaatcgccttgaaaaattacttgtagaggaaattaataccttaatgtgatgaccattttaaactgaatttgggtctaaatattttaataatttattatatattagtaatttcttctgagtttcctgattatttaaattttgcgtcgattttaacagcttgtcgtatttcaatagctcggtttcacatagtttcttgttagactcgagttcacttaacttagcttcgtttgtgattatttcagagtttaatctattgatctcgtttgttagttgcttgttctcattatataactctagtatcctcccctttgtcaaggtatttgaaccaccgtcagtttctggagctgagggttccaatactaaatttagtgagttgaaagtgacttgtaagttttctaaaaatgttagaaattcagaagattcattttgaatttgttgtaaaagctcagcaatttcattctctgatcccacatcgcgattaataaaaacacaatcctcatacttctacaaagatttaaagtaattattggtttaaataccttaattgagacttcagcattgggagaaaagcaaggattcaaaaagttagaaacttcgttcacacattccataatttccctaaaaaatgtgtaaatagactgataaaatgattgaattaaataatattgcctaattttaattaccttgacgtgtttattaagtccttaagtctcggatcagagtctaatgtgtaatttattaacaaaataataggtgtaaaatgtcaaagaaataaagataacgtgaaaatatagtgtgaatatgtaatagaatgagtataattagtttaaattgattatattaccatgttttttaatgaaatcggaaattttatcccttgaacttgatagaaagtccacaacggcctggtcttcagctgctgttgccattgaaaatttatataatttaaatctaactagtaaataaatattattaacatggggaaaattgaaaaatactgaatttttttcgattctatgatgttgagtagagtggtgtaaaggtaaacttagaaaccagtttatttcactctttactagtttcatcattatttatatttatttttatttttcaatatatggtttccttttttgttccacttttaattttctaaactacatcctttcaccttttcctaaacttaattaaatattaactatatatcttaaatattgaggaaatttttaattcgactttcttctaagctattttgggacaaaatggcaccgaatctcggtttgccaaacagtgaattgttaaaaaaagcccgagagatggctgggaggctaacagtaagggattccaccaaggttactaagataagtgcacttttatcttccttacgtaggaatccattcgactctcgttacgagtcagtttcagatagcatcaataaggtgatcaataactcctcaaccaccaaaattccaagtactctgacctttcaacaactagatctaatactcaataagaagtcgcttgatgatacacctactggtgaccatagtaacacaaaaccaactgatactcctgaagttaaaaatgtacaattctctacgacaggtggcacaagtggtgcccagtcatttgaaacaagtaaaaatgacctggagcatgaccaaaaattcatcaaggagaaatgtttggtgagagtgttcggttggtgtaaaagtatgagaagccaggatggtgggagactactattcgtcatagtaaatgacggtagttgtaagtctaacttgcaaattgtggtccacaatgactccaaaggatacaaagaagctctaaagtgtaaatctggaacatcaatacaggccaatggcttcttagtaaatcgtgaaactcaaccgaaaccgccgacggaagtgactaaagaaaataaccctgaactacccgaggaggttaaagactacgagttgctggatgaaattagtaacagatacgaactgcacatcacaagtgatgatagtaactatatccaagttcttggagtaacaaattctccgggtacatatcccattgcaaagaaagatctaacgatggagtttttgcgtgaaaacgcacatttgagaccgagaacatacctaatttcagctgtaatgagggtcaggagttctttgtcaattgcgattcacctattctttcagtcaaaaaactttcactacctgaactccccagtaataactacagctgattgtgaaggtgcaggtgagttgttccaggttacaactctgtttgagaatgttaaaaacgttaaggaactagtaaataagatgtacagtaaagacccgcaacctgaagtttccaaaaattccacaaattccgaaaattcaacaaattctgactcaaagctgtcaaatgatgctgaaaacacatcttctgtacaaccggaaggtgcaaacagtgttaatggtactcaacctaaggatactaactcgaaagttgatgaacctgatgggaaaactgatgggaaaacgaatgcagttaataccgattacaagttattatacaaggcagttgactttaagaaggatttcttcaagaagaagagttacctgacctgcagtggtcagctgagtgccgaaaactactgctgttccatgggtagtgtttacacctttggccctaccttcagagccgagaactcccacactaaccgccatttatctgaattttggatgatcgagcccgagatgaccctagttgatttaccgggcctgatggagataactgaggagtttataaagttcctcgtcaactacatactcaaacacaactatgacgacttggtgttcttcaacaacaccgttgacaaggagttgctaagcaggctctacaacatcgttgacaacgaatttgtccacttgtcctacacaagtgtcattgacatactccaggaatatataaaacaaagtaagttccaccttatacttattttaaaaaaatagttcactatatatttattatttaagtataaacaaatggtggctcataatttctccagatcctgagcaaccgtttgaatacaatgatgttcattggggtattgatttacagagtgaacatgagcggttcatttctgagaaggtgttcaacggtcctgtgataatatacaactaccccaagcaaatcaaggccttttacatgagaaggaacgatgacggcaagacagttgcagctatggatttaatcattccaaaaattggtaccacactattcatttggttgtttttgatagtttactcatcaaattagttatagatagtttaatactaacaaatattactctttgtatattgtgtttaggtgagttgattggagggtcacaacgtgaagaaaggttcgattatttggagaaatcgataaaggaaaacaaacttaatatgcaggactactggtggtacatggacttgagaagatacggaacaatagtgcactcagggtttgggttaggatttgaacgcctgatcatgatggttacgggagtccagaacatcaaggatgtgataccattcccaagatactcagggcactcactgttttaaaggctaattttaactagattaatgttctcaagtttataataaacataaattaattagggatttgtaaagtgtattaactacacatacaaaaattatctaaatatgcgtatattgaagtaaatacaattaatagtttataaagtatattaacacaaatacaattaaagctgtataaaatatattaacataaatgcaattaaaactgtataaaatatattaagaagaccattacattgctaatctattaaattattgtcatcctcttcaatgatcgactgctcaatgaaattctttacattgttcaagtacttactgtcaaggttctcgaaggctaaaccggcctcagtgctcttgttgacggagctgagaatggaaaactcagacttctcaaactgaggagccacaataaccgcaaagagctcgagaaggttcaagtcctcgtcagtgaagtgcaatagctcctgagcctgcttattgatgacctcaatgatggccagcaccttgttgttgtcgttcttgatggggatccaaatgccgttgcggatgctcgtgtagtcctcaatcaggacctggaaactatccgggtccaaaagctgctcggagtacacactttttccgagatctgaatacagattcttgagactcgcgctatccatctgctggccacagttgtagattttgacgccgtcgccgttgtttattattattatattgtttttgttattagcgtacatgttattcgaagcgttgttgcaggagtatgaggagttgtcgtaaattattatgttggtagtgttgacacagagcgacaagatgttagtgtcattcagtgactttacgatctgctcagaagtgtttgacgatatggaataaacttggttgtggatcttgtcgacaagatacacagtgcaattttcagcttggatcagcttcttagcgtgagtagttagagcaataatgcagctctgaatgccaagctgatctgagaacagtgagtgcatcagtgtcaataaactgttggtcttgtcacgacttatctccaactccagcttctttattatgttattgatgaatatgccgctaatgtaacaaagctcataaatatacactaaattctcgtccattattatctcaggaggacccgactccaaatcggagttaactgaaactgaaccattataactaaaatctaatattttacaaccgttttgaggatgatcgtccaagccattttcagcagtgatcacctcgccaagttcagcaagttctggattactttcagtaactatattagttattgatagtatgccccaaatattctggtatatgtcgttgaggggtatcagaatgatattattggcttgtacgtcggtgtgctgatcatattcgggttggaatctaggatcgttagagcaattatcgatttttaacattaatccagtgttaagagctatgttgaaagcgccagctggagtgtaattcatctcctttttgtgtagcatcccctccttcatcatgtaatttatgatgagattggagtcttccacgtggcatatttcaaccagctcacattttacactcttgagtatcgttttcagcgttagtagtatacattttacagggagtgtctccttggagattgtgttaatgaagttcagcaataagagtagatgatcctttgatagtagtgacagatctatgtttttactcagcagggactcgttaattaaactgtactcagtgacgatgctggtgtcgcgttcgagtctttcgttaatactattagtgggaatagtattattgctgtggttgttattcatttttagacttcagctgccccgattacatccatcttgagaaggtattcttgaagtgatggtacggtgataggtaatgagccttgttatacaaaaataatataacaaattttaataataaacaacgatgagaattatttgaccaaataaatgaaaagtgtctgtattactttaatttcaagtaataaaaactaaaatatgtggaaaaaatagatgaaaacccgttaatcaataacagtaatcaaagatttagactcctttaataattctctatatataataaatatacaaaagacgaataatgaaccaatttttaatatatcggtcaggtgtttctcgttgggctctatgcctacccaaataccacacacccaaattttgctggtttttctcccccgtttttttatttttagatatttatcaaataactttatttatttgatgttaaatttgagtttgttgaccgatttcaattatccaaagtcgagattcagaccattgatcgttaaaacaatagaatctacccttgtgattaattaaaataaacaaatataattatctcaacagtattagttatttgagtgagtataacacatctattaactatcacacatctgtactttttatgtattgaccaggttcacaggttgataacctggaaattgacaataatccagtcaagaattattaaattaattacttttttaatttaatccttttctatttaaaatttagaaagtttttcccagtttcttgtttaccctatttatgattccatcattatttatagttccatagatatttgtatttgcgccgctttatgcccatttataacttttaaatttctattatatccactttagaatcctcaggtctaccacaataatatcataccgtaaatttacatattaagttaaaattacagttgtatacatcgctaaatcagtctaatataccagaaaatggtgaaaataattttaaatagatgacttttggttatgaaactcttgtggattccggagaaggtgactttgtgtgtttaggcaacttccaaagtccaacttcgaaggatattttattggtgaaggaaaataaattgcttctgtacacatttagtgatagctttgctagtgttttagataatttcaacccagaatcactaaataatttgagtcaaaagaacaaattgaagtttgttcaagaatataaattttccagctcaatatcgtcatgtaatgtactaaagcaactattatacttcccgaatcttcacgattctgacagtcttggccctgtaaaaggagtagatgaaggctcaaaagcttctgacaaaaacgagtatttggacgggataataattctttctgatggcaacgtgaccatttattactttaatatattaaattgtgaatttaagtcactgtttcagtttgatcatcaagaagaagaagtagatgaggtgttagatacgaactatgagtactcagatatgctggtggtgtaccataaagactgggtaatagataacaaattggcaaatgatgataaaatctacattaaaaattatttaataatttacacatataaacagttccaccttaactttttgctgttaaactcttattttcattacaagggtaactgctcagaactgaactctacaaataagacgagtgatagccccaaaagcaaagacagtagtagaagaaatagcaatgaacaggaaaatgacaagtataaatctccgtacttaatattgtcaaactatataaagatggatttgaaagaaaagttcaatttgaacaagaatagcctggttaaggctatatctttcatagataattatcatacgccaatattgggagtgctgaccacaaattacccggagttcatatcaaaccacaatgtcacacatgaatccaaggaagacaagttacatgttgaaaatcaactagaaaactgtataagcgtgataaactccctgttcatactaaatattgacctggttctgataaacataaatatactaaacaggatggacgatatcccaatgaacacagtataccttagaggactagtgtacaataactttatagggttcataatgtgcaataatgacttgatatactggtttaatatgttcagtagtgatttttactaccaatttatcaattactattcacttgacctcaagccaagacaaggaagccacataatcgataacaggaaaatgaacttagagttgtacgattatagactagaaacaacaaagtctaaatctggtggatttgatgttttgttattgccagaaaaggataatggagagccagcatatctggggaaatttgaatacgacgatgatatagtagacataaagtggcaaaagtttaaacaattgaatgaagaaccattctatgtaaacgattttgatatcgagtttctggatgaaaacaacatgctagttgttaacactaacaatattaatcttttgcaagctactatattgacaagaggactagaggaatcagaagacccaagattagtaaacctagagagcataaaatcacttggatttatcaagcaccttaactactatcattttaaccctaataaactaatcaacgataatcaagaaaataggaaccaaatccaccctaacactgaccatttctgtcttaacacctataatttagctgaagacgaagcttgttatatggttggaataagaaatgataagaacatagtaaaattatccaataaaaagatgttgtaccttaaagcatacattagagcagacgataaatttacaataaatagaaataagatgtgtaacaataatagagcgatagaaccaaaagataataagttgaagataagtaatattggaactgaagatgttttgaatgataaactgatggataaggtaaaatctgttaaatttgtagccgaattcatagccgtattatacactaacgaccaattgcataaatataatgtaaatgagtttggagcccaaaacaccagtaaacagagtaaatcaaccaagagtaaaaaaaacactacaaatgccagcaaggttgaggtaggagttaaaatgttcaacacactggaacataaaaataacgcctacttaacctacttgacccttaataattatctctatctgtacaatttaaactataattttatagtatttaagttaaataatctcttacacctaaacaataccgtcatgccgcaagtttacaattatgacgccattttacacgaagctgaacaagagatgactggaggggattcagagcatggatataggctgaaagataatgattctgaatcgaataaccaaaagcttaattcgtctaaaactaagagtaagttggagataatggaagagatagtggcgtcacacatgatagttaaggaggaccaggtgtatatgatgttattgatctcaggatacccactgtacatttataaacttgtggatgtaagtagaaagcttaagagaaggttttgttattttaaactggtaaaacataatcaaatagcgccattcccatcactattgctaaaccacgataacgtagtgtacaagttaaaccctaaaatagaggaggttataaatgataataatcaaatctttgcatatccactgttagaagtggattcagacacaacgttaagtgtttgtgatggctcagaagtaaataaagatatgaatgggagaagtgtacccaatgccgaagtggtaaataatatgtacagagatagatttagagaattctacaagaggagctcacttttgtttttaacgtcaaattacaacagactttaccttcataagttatcactaattaatccgacgaatttgacatcagatgatgggagtgatgactatagtgtgagatatttggtgacaaacaattatttgttttgttatgataacaataaattgtacctgtacaacaccagagatactcaaatagagcattattttaagagaaattataataatctaaatttcaatgacttcaatattcacctatttaactcagaaacgaatactgaaaagggtgttaagagtaaggaagttgatttggtaattgatactactgacactaatactaactctgttgatggtgatgagggggtggtggacaactatatgtataaagtagtaaaaagtgataagatcaataacatgaacctgttgacagtatcaaattattactatgtgtataaaaacaatactgtgaggagatttacaacacttaacggaaagtcgagatttattaatggaacaatgaactcatatacaggcgtgatggattattcagatggagaattaggcagactaataagcatagtagtgaatgtgggagaaaatgttctgaataatctgtataatatgctaaatgtgaggaacagacttcaaaacttccacaaaaacaatgataacattgttagggataagaaaaactttattaataaacagttgaagttgttcattcaatactaccagcacttgaaaagtacacaaaatggatcttcagaatttggtaacgcagttaaaatcagtgagggctttgatcctgatgcactagtgcctgaagattacataataatattattcataagtaataacgacttgaagataataagttactataagctggagagttttgagaaggtgttgtcgttgaatttcggacttataaaaacccacgaatacctgttggcaggcacatgtacaaacctaggcgagtatgtggaatcgaaaagtaatttgatagtactggactacatgtccacgaaaaatactggtgatgccaactacagcacagtatacagtgcggacagtgttactataactgatgttgttggggatttatttaagaacgttagccctatgaagttatacctaaagaggacattcctgtacccaatcacgttcatatcgacgctaaacaacaaaactagtataattaacgacttaataaagaataaggaaattaatcttcagatcctggaggagcaggaagaagaagactcaagcgcagctgaggaaagtggagtggaggagaagggtttaaaaagaaaattagacaacgcagaaaattatggagttgactctagtgtaacaaataatggtactaatattaataataactcaactgttcccagtctcagccacgacgagaataacctgataatccactcagttggaagtaacatatacatacacgagttaaagggtaaaaatataatcaagggtgcctttaacgatttatacactacaatatcagccgtttcaattttcaacaacttcctgttaattggcgatgttttgaagggattgtcgctgttcatgtattcattatttagtttacttatctaaaaagtataaaaatgctataaaaatgttaaatttatcttaggtacatatataataagaataatgataacaagaatatcataaagatatcgagcactgacccgaagataaatttgcccattttaagttgtgcaccactgattgaagataacttgacctttatggccacagataataaccagcacttgcttcagttcatacactacaatctgtacaataccaataaagatgtaaatcctacatgtagttacatcaattccactttatacccgacgttatttcccgtgctaaattttttttagaaattgatgctagtaagtgggacgaaatttaataataatataacccaactactgagtactaaccagaagaacgtattggtaagctaatatcttgatgaattttttagtttggagttagcagtagtggctgtatatacagaattataatgaaaaacgacagggtgttcagcctgataaagaaaatggaaaccttgatttctaaggaaaacactttgacactgacgagtgatctctattatttacaactaaacagcatcaaaaacacaactttgtctctggactccataaagtaaggattttaaatttaagggattgtttagggaagtgttccacgagaccagtgagtaccacaagtcctttctgggcaagctgaacttaaatcaacccacttcactggtaagatttaaagttaataattcatttagtatgacctcctgaacttcttatatcaccaattgttctcaatgtgatacaatttgtgtgcatacatgagtacataagtatatacaaaattgtacatacatgagtaaatgatagtgtgtacatatataagtatacatacactgttaaagggctagaataatatatatacgtgaacataaattagtacaccatagtacatacattaaagagaatagtttgtatacacataggtatgtatatatggagtgttttaatatgtgtaaatttaagggaaatattaagtttacataaaactatcgtcatcgtcatcttcgttttcatcgttggtttcataaccagcttctagtttgtatctaaggatgccgccaattccaccaaagccactttgaaattgagacccctcctgagacttgttagttacaaagtctagtgttgagccgtaattgtggtagttattgataatccactcaatcaggggtattttatccaaaacctccaaatcaacgttgttgtccttaaagttcgcttcatctcgctcctgctcgtggttgagtaacagtacagactctgtgtttgttgaggggttcttgacgaggaccctcattatctccagctgttcgtaaataattaggacctcaatcattccattttccagagcattaacagtgtcataaacaccatagacatatttgcctgaacattggttaaataatgaagttaaatagtgttaaataatcttgaataatgaaattgaataataaagttaaataataaaattaaatagtaaaattgaataataaatgttttgttaaaaagtacctgtgtcgtgggcaatctcgtcgaaaaacctcttgattagtttcttctcgtgtatgaatttaacattcgataaacactccgatgataactcaattgcttgttgaaagccgttttcgccgccgtaacagacgtcaactatcttcaaaacctttgaggatagcctttggtcaaaaatgtcactgttggccaagtcgtttttaaaatcagcgttgcctaatgaaattttaaataaaattttagaataaattttagaataaattggttacctgctaaaattagtccagtcacattaactttgtcgtttgttatgaacatgttgactgcagtttcagcgacttttctgatatagttgtgtcttttctccattcttagacgagcaaaacggagtgcagattgaccccctcttccatgctttttcggtaaatctaccgtaaaactgtgaagaacctgtgaaaatgttaatataaaggtaaatgtgttggttcacacctctttggttgagccttgtatggtaccgtacagtgcaccgttaccgtccataacaataaagccgaatttatcgtcactttccagaagttcgtttaaactctaagaaaatataacttcataaagtatacctcaacgtggaatttattgtcacagagatacagcgatgtgttaatgggtttaaagggttcgaagtctattgagactttcttctctttaccgtcatctgttatcactgtcccacagtaaacaacgagtccgttaggtggtgtatttctatagagctttagacctaaaattttatatttagaagtatgaatattacgttgcattgtggatgtgattgctgataacaccgataagcgattaactcgagatttaatatttgaggctgtgccgtactcatctgataacatcttactaatcctgttcacatcatccttaggtctgataattaaactgatcatactagtcccgtttctataagataattaaagttaaaattatggattgaattattaaggtataaatttggttaagtaaattttagaaacaaacccttttgcagattccaatttttggatcaaccgctttattttccactgctcaatatttgtgtcactcatctttttatttataattaattattttacaagattcgaggaagattttaatacactggatgaaaaatactataatatagaatttattagctcaacttaatgtggattcaataatataaataaaacagatgagtgaatttattatttatacacattaaaagtataaactaatgattaattctaagattcttagtggtgccagtcagtcacactatcatattaaattatcatttagagcatttaattttccaatataaagttgattttaccttttttatagtttttatatcgtaattttgtattatatttgatcatttttctttatttatccaaattgtgttaatcaggattatatcatgaaaagtagccttaatcctttgaaaaaatatatatcttccttttttaagggtttgtatttgttgtttgtcctttcacttgcaattgttttacctatgcttctcttttaacttgatacagtgttgagatcttttaaaaataaaatgaaattttaagaaatcactcagattatccatttgaataataaactggaactataactgggctaaagtaaagggtaattcttaaatggtacccataagaccacttggtcgagtaataacgcaatttatatttgtcgttagcgggagcgttattaaggctacatacaacgcgtacaggcagtccttgagtaacggtggcggcgtttttaccgggggaataagtaaggtaatgagtaaggaggaagccgctaagattctgggatttaactcttacgataacttaaagcttaaacaaatccaggaggcacacaaacggctcaaaaccatcaactcgccctcaggttcatttcaaggttctccctatttaatacaacgcatagacgccgctaatatcatactaaccaactttttaaagtctaatcgctcaagtaatctctgactgcaataatattctagggtgtattgatatgtattaattataaaatgaggctcaatgtgttcaactctagtttgaagtccaattccattttaaacaaactcctgaggctaaattcgaaaaacctaaactatgtaaagaataaaaacactttagagtttaaaaagggttacatgtacaataaatatttcggtaagaatccggaacaatcactggcttacattaatcagaaggttgacgatttaataggaaatgatgttaaaatgctggattcctgtaaatttttactaaattttaacgttaattacaaattcgttaaattaattgaggataatattctcttttataccaataataacaacttgtactatttgctgaaatatttactaatataccaaacaacgcctgaacctggtaacgttgtggataattatgaattaataatgacagttgttgacaaaatttgttataattttcatgaaatttctaacaagcttgagatattgggtctgctatgcgactttgaaatagttcacggggattttacacatttggtttataactttataactgatccagctaatattaaggtacttgaaaataacatttacaacgttttaaggtacttcaatttatgcaacaaggtcagttacaatgaatatacctccaccataattaacacactaatctccaataaatcccagagaaactataagattcgtgaattgctaattatcttcaaaactttggtggattactgtgattactcaaccataagttctggagattactttaagtttctgttatccagtatcggtagtagatttagtgccagaaattccttagaatttatcaaatttttcgagattctaactccttattcctgctatccttacttaaattgtttagattttctcgataacgagaagattttactggagttcactaacaatattcaactcattgacaccagaaatctcattaacatttgttcaatttacctgagctacttaaagaactctgaaacgctcttgaaattcataaatttatcctcaactcaaatttttaatcattataacggtgtaattcgtaatttgtccctgtttcaagtaatagataaaaaaaataactcccctagttccaacatcagttctacttctgaacccacaattaaaccttcaattaacttagatactgaatttttgagtggagacgagttgttaaggctaactagaaggatgtgtaaatttttttataactgtaagcatctgttagatcacttaagttacgctaatttacttgaaattaacggatttttatcaaattacgaccctattatccagttcctatcaactccatttgataggctcagtgattcctacactctttttagtaaacacaagcctataaagaataaggagagggtattacttcttgacgatatggttggcaactatgttctcaagagaaatcaagagaatgaagacagcactaacagcagtagtggaatgagtaaactccattttgaggtaaagaatgttttaaatgggctaaacatttataatttaactaatgaagttacaattggaccctataaaactgatatactaatatgttaaattttacttattatacatatgtatagcataaacgtataaaattagttggtaactagattacttgttatgtgtatcgttttcctcattagaggtgttggcgttttcagaggcattggcggaggtggagccagtgtttgacttcgaataagctgcctgagagaccttccaagagagttcctggagttgtttgtgtttatccttgatggcgctaacatcgtcagtggtgagcacctccttaagtgaagttgatagggtcttgagctggtcgagttctgcctgagataccttgtccttgaagtcagtgagttgcttttcaacgctgtaaagtagagattctgactcgtttctaacatccacaagctctttcctcctgtcatcctgctccttgtagtttgaggcctccttgaccatcttctcaacttcctcttctgataaaccgcctgagctttgaattgtgatctcctgcctctttcccgtggacttgtcaactgcagagatgttcataatgccgttggcgtcaacgtcgaaggtaacttcaatttgaggaacacccctcggtgctggtgggataccaacaaggtcaaattggcccagaagttggttgtcagctgccattccacgttcaccttggtataccttaatacccacttgagtttggttatcagctgcagttgagaagatctgtgacttctttgtaggtatggtggtgttcctgttaataagcctcgtaaacacacctcccaaagtctcaataccgagagataatggacacacgtccagtagtaaaaggtctttgatctcaccttttagtactcctgcctggatcgcagctcccatggcgactgcttcatctgggttaactgccttgctcggctcctttccgaagatgttcttcaccacttcagtcaccttcggcatccttgtcattcctcccaccaggatcacgtcgttcaactcacttgcattaacgcctgcgtcctttaagcacttcttgcatgggtccacagtgccctcgagcaactcacttgtcaactgctctaacttcgagcgactcaactttatcaagaggtgttttgggcctgactggtcagctgtgataaagggcaagttaatctcagtttgggtcttggttgaaagttcaattttggctgattctgaggattccctgagtctctgaagggccagtttgtccttcttaaggtcaattccgttggtcttcttgaactcgtcaaccaagaaattcaggatcctctggtcaaagtcttcaccacctagtgaagtgttaccgtttgtggccttaacttcaaacacaccgcccaaaatctccaaaatactcacatcaaacgtaccacctcccaagtcgtacactgcaattgtctttccgtcattcttatccattccaaaggccagcgcagcagctgtgggctcgttaattatacgcaatacttccaagcctgcaatcttaccggcgtcttttgtagcttgtctctgagagtcgttgaaatacgctggaactgtgataacagcttttgaaactgttctacccaagtacgactccgcggtctccttcatctttgctaaaatatacgctccgatttggctgggggagtattgtttgccttgggcttctatccacgcgtcgttgttggatgatctaactatcttgtaggggagagtctgttgttccttcttagtttcagggtcgtcaaacttacggccgatgaaacgcttagtggcaaaaaccgtgttttctgggttagtcacagcttggcgtttcgctaccacacctacaagtctctgaccatcgtctgtgaatgctacaatagatggagttgtcctagcaccttcagcgttctcaataaccttcggggttgagccttccatgattgcgacacaggagtttgtggtacccaagtcaattccaaccacgtccccttgaaccttagcgaaccttcctgtggaggtaaaaatgcctctgcgggacccgattctcaaggaatccaacattgttgtaattcctgagattgtagacaacttgttcgataattcaagtgaacatcgagaggaattaaaaatagaatacaaacgccttaacgacttcattttaaaatgcttgtggttgatattttattcacgctgcgtttaattttttatactaataagtatcagtctctactactatattatacaatatgtatactgaatttggagaagattcctgatacactaaaacaaagtgtattcaaatgatgatttttggtttatatactgataaaaattaacatatttagtgaaaatgttttctgtagcttgtggggaaccatcgggccgagattctaaggttttttaaaactaaacttccgtaaacacttctaatattttttaattctgactatgttatgacaataaaactatggagttccaaatttattcgaaatttttcctcgaaatcctcaaagtgtgttaatccttacccaatgttattttataccaaaagattattacttattaacaaatgaggcctgagttccgagttttcctcctttaaaatttgaattactattataaattctctttgtctaacattatctaaatttttttactaccacacacactcgtttatttttcaattttttcattatttatttatcaataattgtgcaccttatatttaatccttgtatttatatatttgtatacttatgtgtatcgtttaatcccatttaaattattaattgccttgacttctaaacaacagctctaatgtgttgaaatatttatggaatatagtaactgtgagcctataaagtttttaattggttttgctgggatttatttatattaacatatatggccaatgtttctatgtaataatggacgttttattcaatattaaaagaattaaaatggtctttctgtgtttatcatttttcgttttaaagttctctaaatcgcatttttgcccggaaaatatttgcaaactttgctgtaaacccactcaaagcggttgtgtgaatgggttcgtccaaaactataatcaagcactaactagtgtcagtttagcgtgccaagtatttattatttttaatcatttattttttcaggattgtaactgttcgaatccacaaataggtttgttgttattttaaatattaattttcttaatgaaattttttatttttctataatattttgaaggatgtggttgggccggtagaaggttcaaaagagtggaatgtaactcttgcagtactttaaactctctaattgaaatgttagttttcatcaccataaatatgtatcatatatgacgaattaatcatattgtgttttagaaatcccgagttacctgtggctggatgtggaaaatcaattattgaaggagcattggtttatacgtcctagttttgtaaaatagctgtagatttgtaaattatattaaatccgtccctggaatggatgaaagagttgtggtcttctatcaccagcagtggcttcctgaccttgagggtaacgaaacctttccggacgttgggatgtttagtgtgaatacttgtagagaagtagaggtagttttagagccacacgtgttagttttatgccttttgcgaaaactcggaaaagttaaaattatttttaagccttgtttatatgacaggttttatgatggagttcttccagcagcactagttaacaaggttaagtatatacaaaggatacccggggagtttgagaatactaattcagatacttctagtgatatctcagtgaaaattaactatgaagataatgagtcagaatcagattatggagtagtgagaaacgaagagttagtttcctactttgtaaccttattaaacttgaaaaataacataaactctactgaacttgaaagtgaattctcattatatgatactccacccttgagtatcaaccgtgacgttctttaccttaaaagtgaagttgtaattccctcgtacatttacacgcacttgaggtatgccgtaatgtacctaatctggttccatcctttgatttctcattatacacgagaggttgttttgaactcagaacccttcccattctcctggtattcatttcttagaaaaaaatcacaggttaagaccgagtgtgaaaactttggctactccacactagagaacactcttagggatctcaggttttttctccaaggaataagactaacacttgccgcaaaattgtatcaatattcacattacaagtaagttaaatctttaactgatttttttagtacaattaactggtttgaagggtgtatcttctctaatttgactgttcttttcagtctaccgtgtcaaggtatttattaattatatacagaaagtattgttgaaatactcttacattatattagatttggaggacattatgagtttgcacaaggaatttgaggatttgaaaacttattgcataagaatgaacgcaaggtatgaagttgtttccctcaaaacgccatttttatccggagataaagtatcggcttcgcattttaagaagaattccagcctttttaaccatcttcttaatgtttaatcaaattcttatccgttacttagttaacaataattactttcaaatcttttaatccatttaagctctctaaagttcggggtattaattacctgaaaaggtctggcctgtaaccgaactttttaagccatccttctcgtgcaacttgtagaaatgctaattttgacatcctagtaaacctgaaaatgccccttccataaccgcctcctatacaccttaaccttatcctgtataatccaaccttattatcgattggaatgtggccttttagtccaaaatttttataaacatacttgtacaccctggtgttcacttcagactccctgaaaagtctacgggatatatggtctctctgaacccagttcttaaagggagggaatccaactggaggatcaagaatgacaggcccagggttcctggcagccatattaaacacaagtatggattaaaaatatattgccaaaagttaaaatttaattataaaaattttaaaaaaatttggaaattttttagaaatactcaaaaataattcataagaattaaaggtgatgttgtgtaaatgtgtaacaagaattgaaatgggaaaacatgtattgtgtagttttttattatgttatttaggttttagtgatataaatttaaccattttgccgtccttctgctcagaggtcattgagcatttggtttgaataacattctaaattatgaattggaaataaaataaattacctgtaattttctaaaattttcgtttttttccttgatattaaaatgttccaaaatagactaaaaattaaattaataatactatataaagttaccttaactgtaactttattgttattatctttgaggaataagagtactttatcttcaaaggttagttctttaggttgagtacttttggcaggttcagctctaactttggatgaaactgaaacctgagaggagctgtcctcatcatctgagtattcctttagctcctcgtccacttcctgttccttttgtagtattaacatactcttcagactctaaaagtatttttgtaactggaatttatacctctccgtatgacgttaagcttttgtcataaaagggatcctcttcagcataattagtgcgattagtcatgtatacgttttcatcgtcacttagctcctcattttcataatcccagcccaagttggttttgtcgacattggacaattttctaaaatatttctaaaactaattaactacctttttttaggtaattgtttatcatcaggtttaggtctatcttcatcagaagctctagtcattttgttaagcctctcttggacgttatcctgaagatatgattagtgtgtgtatgaattggtggtaagaaataaacttacagctttgctgggttgaggttcatttgatttgggtgggacatatgaatcaaaaataaaataattcgatacaggagaaaccaaaaatgtgttatccacctaaaaagaaacaatcagttatggaaattattgagcataaaatttgaaaattgtaaatttaaaatattttaccttgtgttctacaaccataaaataacagtcggtgtcaacttggcattttttagacctaaattgtcgactcaaagtattatcaatcagtgaagatttccaaataatactctcatcatcaaatgtagaagaaggattctgtaaaaatacagttaaatcaataagtaaataagattttttatgtaaaataaaagatgaaacggtatataattaaataatagaaaaataaatagaggtgtaatagtaatagctcacaactggattgaatgatgcaaatttcagtccttgtgcattatctggtaaacaaacaacacctaaggtgtgattttctgattgatcgagtcttaatttggttttgaatgggtcatctgggaccttatcaagattgtgaaacctctaaaaaatatcaattttaattctgatgttgtaaaattataataaaaaacagtgatttaatttcttacaggtgaatctttgtcattctttggtgtgttttgcgaaagaagatcgagaagttgagactgtggatggaaaagtctatccatagagtattttaaaaatatatttgggtttataatttaaaaaataatgtacaaggcgggacaaataaaaattaaaaggttatttatttaataaatatatattcaaattacacatgatgaaaaaatggtaaattgggtttgaaattaataaaattgttttttataaattcaaaaatatagaaggtttattcaatattataatttcttcaaaaattcttaattagttaatcatacacttctataagattaatgtataaattatttacagggtgtttgtggaaactaaagttctgttcccttaaacatttagttatctgggttttccagtccttcatatatctttacaaactcctcctcttttacttggacccaaacatcattttctagggtcaaaaattgcctttcgactttttggggtccttttatgaaaagctctgccaatttataacctttagataatgaatttttgaatggattggcttcctgtgaaaattcaaccagatttttagaatcctctttggtttttctgtcaaattcgccgtaatccccgtaaagtgcaagagcagcgagtctctcctttatttcattggtccacaacaccctagcgcagtcgattactgaagtgatttcgaaggcgctatatggtacaaaagtttggaccataacattgccaactctaccaattttgtgttcataagctccagggtcaacctttacacctagatctaagtgtgtgtgagtctttatgagttgcttaagacctattgatctgtaaaactcaggagttgatatccacacccacgatttatcatcagtcttacctttaaaataggattttgcatcttgaaagtggtgagtccttgttatactcgagtcatctctacaagtcaattgaaccagatgcttatcctcattcctgaagtaaaaaagactctttacagtatctttaccaggggatacccatagtagctgattttcgcattttactattttcaaaggtttctcgaaaggagggaagtaagcgaccgaagggtaaggatccgctgtcggactctcaacgaaattctgtatgtcaaactctccaaaagattccctgggataaactattttctttatttctttattgtactccctttctggcaatttgaacattttgtctgttttatacatgaagtatagatggtaatattttttatctggctccctagtatcgcataagaccaatttatacagcctaggatcagaagaaactgtgtaagaagcttttataaagttttgtgtctggtctctataccatagtgtatgttctttggcgacaatcctctcgactttcttggcaggatcccttaggaatgtatcaataaatgacacaccctgttcaacggaactagagaccttaaatatattactttcgtgcatatcaagattaagagttatgtcggtcctggtagagtatgcgaagtgcttcataacgaattggtactctggaagagttatctcattatacgtgtcttcatatgccgaataaaactttaaatccataaagcctttgttcatcgtcataaagctcatcatctttggttgagtttgaagtgaaaaatgacctccagtaacatatgtgtcgtcatcagaatgccatatgacattggtcccatctgctataattttaatgcgaatatcacctttgggggtaaaggaataaaaggttaagtctcccttagtctcttcgtctagatgaatcttgtcaaactctatgttagatatatcgaatatttctagaggtgtttccttcgccatttctagcgccctaaatttatagttttcgtttgtcacttgattccatttttcagtcttaagaaaccttttaacagaaataacaccgtccttgacgtatgtcacggaacacattgtaggcctgagtctaggaataaatgttacgagattaaccctttcatctggtacaaaggttattatagtttcatctttataaaacaattttgtcagacgtcggtttctgtgtggaaccattgcccctatgcttaaaaagtttttcatacgatacgacaaattgtagtttttagaggtttgcaaattatacaaatcaaaagagaaggtaatctcctttgttggcctgttattatcatgagaagcatcgccgcaactcactaataaattggcacaaaagaataagagtaccggtaactggattttattcatcttgaaattcatcacatgattataataaaacaaaatgtgtattgaagtgtggggaaatacagcgcatatatatgacaatttacctataatcaggcagaactgatcaattgcgtatgcttctcaatccttcctgcaacctcggggaagatattttaactctatgttaaataattaaatttacaaccatttcactacaagatcttgaaattaatattacacacgcaattacttaagattagaatatactgtaaatttgaaattttaccttctttagaataattttgaaccagccaaaaaatatttctaaccctctttctaacttattcaattgcctgggtatttgaataaaaaggttaaaattgctaattttgtcattatccagaatgcaacaatagataaatttttatttttggtgtagatctttcatttgacatgatatttatccttaatttttaagtgtgtctatctatcattttataaaaaattttaaagttggaacaaaaattaaataagttggtagttaaaatatagtattttatacaaattaaaaattaaaaacaatcataaccggatatgttttctggttcaaggttcgacaactgaatttatatctctcattagatctgtagttagcatgtttttaaaattagaagaaccgccttcaaatgatttccaaaaccagaaaaatatagattttatccaaaaaaatccagtcgtatctttagtaggccaatttttaaggtcttgttcatacttattatagatcttgatgtagccagaaccccaaaagatacttacaaacactagactataggaaaacatagtattcaaactggaaactgtaccatttttcctatcttcctgaagacccactcctgcaaatcctattgactttaataaggaatataaggctacaatactatcagtcaaaaaggctagaattatagggcttcgaacagccttggaaaacccagaatttgggtagtgcattgaaatgagaaaacaaataatgattaaaaggtatggaattatgagataatgaaaataattccaaaaataatcattacctttccactttttatttggaccaaggccaagtaagcagaggagagatataatagttgcagagactgcaccagatactaaaacggttaaatcaattatatgagcaatttccagtgttgtaagtttataaggagctactgaggggtaaaatccaaagacaagggaagctccgaaaccactcattaaaataggagatttcgcccttattatggatttaaatattgtggaaattttagagagttttttagcatttacaaattcttttgaattaatctgtaaattagaaggttcagtaaatgtcacactagatgaatttgattcatttttgtcactttcttcaaatgaatttgaattactatctgcattttgtttaaattgaaaactcgtaattttcgaagtttttaaatcatctgttttatctcctaagtttactgtagtagagttcattttggcgacaccaaaatcattgattccaatttcagatccctgatcaatttgacgccttttggaaaaactaaatattttacacacttgtgttttggcaaatgatgtggtccacagaaaaaatgaaatagctgaaatgattgttgtaataaaaatttcagatggaattaaccaataatcgacgtcgaagttagtgattggtttggtaatagctaaaaaaatagcttgaaacaatactatttgaattcctgcgaattgaagtccacagacaaaaaaggccaaaaattcaactccaatacaagccgcgaaagttctgttaataccgtatgcaatggagcacaatattgaagtccaataatagagggtcaacatacctccgcgacgttttattatataggaaagtaagtggcaaatatttaaaagaaaaaccataaagttggtaaaaactgataagattacgtttaactcgaagtgagtggatccaaaagaccacatgtatatatttacaaaagtaatgccaattatgttccaggtatgcatagaagtgtgaaactttgacacataaattgaagataggttaacaggaacaccaaaacgccttattgcaaatcttgagcctgagcaagctgtacgatacggttgtaaaacagttaagccaacaatgaacatggttaacatcttcttcgagttctgcctgttattggctataacttttttcaacctgtaaaagcccccgctaagcattatttttgttttaaatgaaattttagaggattttagggactttgtgggcgttttagcgccagaacttcatgggtatggtacccattctaatttgattctaaccatttaaaacggaatatgttcttttatgtatatttttttactaatatattaattttataaatcttctttttaaaattaaactgttggtaaattagaatttatgaaattttgcaataaagggtaccgacacaacacaaaaattaagtaccatagaaatatataggtgtatagtaaatttttaattaaattatttctcagatgttgaatccacacaacagcgagattttgaatttaaaattaaaaagcgaataaaacttaaaataggatgcagatatgttttctaactgctcgttgctagagttatttttactctgataaaattcgacaaatcgatacatataatgtgacatttctataaagttgattatatcaactattttcaaatgtgattagacttagttcacgggaaataacgtttttccagttgcctttaaaacgagatcccataggtaggactcctcatcaggaagcagggagaaagaaacccaacttccttggtcaaggacaaatgcgttataaactggttgataagcgtccctgaaaaagagtaaaactctttggagtgtgccgtcggtgttgagcttagtgaaaaacgccataagcttgcgggaaactttatcttgctcgtaaaacgagaaatcgtcaagtctcaactttttaactgaatcctttaaaataggtacgtacacagtctgtaattcgtcaactgtatacacaaagaaatttttatcgcaattgtttaattttaactgagaagtagtttctgaacctgattctttgtcagcataagacagagtgaccaacaaatcttcaggtgatggacagagatgagtagatgaagcagcagtctctgcatcactgtcaaccttgtcagattcggaatcaacggattgaaattctttgcgggatctgaaatccttgcatatattatcgtagagactaacgtaatctttttctatgatctcagaccatttatcatcttgtgacctcttaaagtacttgactgaaatcgtatctctatctttaatgtatagttgaatcagcctcacggtagaactgaaaagatgcttgtattcattttcatgaactgttaaaatagattttacgtgttcattcactgaattgctcttccaaactggttcgtttccatctaatattagtcccacgtgtatgtctggcattgggttagatatacgtattgggtgtccgaactcaaagccttccttagtctcgtattgcccaacgtctggaagtaacttgagatcaaaagtggcatattccctaagaactgatacgtgtaagaagttgttgtaaaactcttctttatcgatcttttgccattcaccgcgaaccaaaactggggttagcttttcgttctgggagtgagggcgtttgtccaagaaggaagaaacatggtcgagtaataaagtctttgacaactccaagagttgatctggaaccctatcatcgtggcggtataactgccactttccatccctcttgtagtaaaaggtgtaccaaagtttgtgacccttagaacagtatagacctagacacaagtgtgacggtttattctcaggcaagtagccaaagttggccaagtatacatgacccttttgttcccatacaacagtcttgccgtcaaagagagtagtaagaacgtagtcagagtgaaccttgacgtaaacctgttcgtgcccaagttgagttaaatggaataggtcgaatgcgtcactactttcgtggtggacactcaaatcatatgtaaacttctcacatccgacagttagactggtggatgtggtaggaaggctattatctgaaggaggtggtagatttgagaagtcttcagagttttgtaataaagcattctcaagtactttatcttcactagatgttagaggtacccaacgtccattgtctttgaaatagtaatcggtatgcatagtgccaagatcatccacgtacataataacaaagtattgaggtttttctggactatagaaagagaatagaacaacttgtttctttccgtcgttgacccacacagacaaattgccatcgacgactgagtccaggaatgaacctggatggactttaacccagacaacggcctggtccaaaatgtacaaaaccttaagctcgtagttggaactgaaaacgctgtaagacaacatgtcaaagtcaaagtgcgagactaaattgtttgataactccagaagctccttgggtacatctttatcatcactgtacaggtgccagcttccatttttcttgtaatagaaggtgtgcctgagattgtgagacttggtgcaatgcaaacctaaacacaagtgtgacggattcttctcaggcaagtagccaaagttatttaggaaaacagttcccttctgttcccacaccacagtcttgccgtcaaaaagagtagtcaaaacgtggtcgtagtgaaccttaacgtaaacctgtctatgtccaaggtatgttaaacgaactaggtcgaatgcatcgttgctttcgtgatggacggtcaagtcaaatgtaaacttctcacaacggacaggtgcggagggtgatgtggtgtattgcaagttggattgtatgagttgagatgaaaattggggacgaagagtcgtgtcatcatccgtaagaatccacttgccatcaattttctcaaaggtttcgtgaacgagattgttttgtgtgaagcaggtcactactaggtgattgggattttcgggtggtaagtagctaaatactaaagcgaattttttgtttttaaagcgccaaataatttctttgtcatccctaatgtcaaacagaactctgaggttgtgaaggttaacaattctatatttctggccgaggtgttcatattcctttatttcatagtcatcggtggacatggagtgggatgacaagtcaaacgcgaagaatgtcttgctatcaagagactccgatagtttcaacaatgcgtctggaaccttatcgtcgtgggtgtacaaatgccactttccacctttcttgtagtaaaaggtgtaccaaagtttgtgacccttagaacagtatagacccagacataagtgtgatggattcttctcaggcatgtagccaaagttgaccaagtatacatgacccttttgttcccaaacaacagtctcgccatcgacaacacgagacaacaagtagtcagagtgaaccttgacgtaaacctgttcgtgcccaaggtatgtgaggtgttgaagggtgaaatacttgttagtcttgttggaagctgacaagtcaaatgtaaacttgtcacaaccgacaggttcggtgttggatttggtctgaaggctattagttgtaggagatggaagggtatcggttggttgtttcggtagattttgttgttggttttcaagtttgagtgtggtgtaaaagtagtgcgaagttttgtggtctaagaagtcagtggtgactctgaggtataggtcatttttagtagcgtaaaactgtagggcgttgacattttcaatgtgtgaagaatacaccagatcgtcaccgtcgtaaagatctgtgaccacaagctctttgggaactggataaaacataaacgacattagatgttcctcaacgaactttgaccctggcttgctcatcaaatttctgagggatttcaggatttctttttgtaacgggcgcaagaccttggttgcgaggtttgaaaaatcgagagaaacctttgttgctacttttttgctaacgacttctggtatgagaaccctcgtgaaatcgtcgggtgaggtttcgttccaacttccatctggacttttcataaagtactttacagtctgttgtccgcttgcagagtaaacaactgctgtggccttaggttcgtcaaatggtgcgtaaagaaccctgtagcatttgtcgtctggtccagaagaccaaaccataacctgagaatcaaccaagtgtacaagctttttatgtgctcttggtaaaacagtggccaactttactccccggatagtctcaactctcaactcaaagttcacagtactgtccttgtccttactcatatcataaacgaactcgttggtgttcaatggtatggctggggttggtggtgttgaaggctgggttgaacttaataattgatcatgatctaataatttccttgtgaatgaataggagttgttccattcgccattcttcttttcaaagtataggtaacccaacgagtcgggcgggaagtctggcgagcttgagatgtatgagagtgtgaggtgggtgtctttaggatcaaggttatagtagagattatagacaaagtcggtttctggcacttcgtaaaccgaaaggtctttgtccttaacgactgagagtctgtgggtctccaacacgtacattgagtagtaattatagttcgctgaaagctttgttagagtaaacccatccccactctttcgggaacgaagatcaaaagcaaactgtttaagtgtgtcggatggtccagggttgaaaagcttgtgagaggacaatagtgaaaatagattgtcaaagtgttggtcgtcgacttcgtaccactcgtgtttctcagatgcgcttctcaagaagaacttatggagagtatcatcgccctggaggaatgtgacagtgaacattgaaggcttatccaaggggtaaaagattaaatctaaaaacttttgatcattattaagcttaaataatggctctccggagtaagtaatagccagaacgtgaggagtggttgaactaggggatttgtcagattcagattcatcagatttaatagaggccatgccaaatagtattgaatcgtacttgattagtccagttttcaaaaagtcataccttgttttgatctccttcgatggtaatttaaagccatcatagaggttaatataactgtcttcgagtggtaaaacgggttcgaacttggaaaggtgggtcagctcaatagtgtttgaagttccagagtaaaaggaggagaggtattcaaaagcgacagacgaaacttcagaccacttatcattcagcttggaataatatctaatatcaaggtctgtggagagaactgagagaagctcaggtgcgtcaactgggaagaagtagcaggaatcaagacgggcttcttcacgagataaccaaacaggttgagggccatcaaaaattgaaactattttcttacctaagattggggttaccaccaaagtttcaaaagcgctgttcaaactctccctcaccaccaagaaatcttcgaaagtagtgtttccctttgtcaactgactcagatccactgatacagctttttgttcggacttcgagtacgataacacgcgtttgtcaaactcttcgtcgttcacaacccaagaattgttcagaacaaactttctcgtcaatggcttttgagtgccatgggaatgtgaatttttcacatcaacaagtaaaagttttggctcattgttggggtaaaatgatattctggtaatcttctcctccgacaacttgtggtaaataacattgaaggagtccgttaccttagtcacttcaactccagactttggcacaaaagtctcaaagagtaaatctttgtacagggtcaggttgtagtcatagaggcacttgtaaaagtcagcagaaaagtcgagacttaaatcaaacactagtttaggaggtgaagtagtggaaggtgactctgtagcagagtatagtggaagtttgagaatttgtggaatgttcattggatcagtgtatggagtccatttgttctctgacttgtaatagtactcgaattggacttccctggcacttgaagtgcgggaggcaattgaaaagtagattggattatcaggtgggtagtacatgaaactcaagacttgagtcacggtctccttgggtgtccatacagtaaggttattgtcaaggaccttcataagcctttggtttttgtgaactgtaactaacacgtagtcgaaaggtttggtagtttgcctttcaacgtcatagtgtttgttactaagattgttcgaatcacttatgttgtaatagaactcgttatcagggttaaacaactggttctctgggttaagctggtcaaaggtatccttttcatgtagcagctcttttaacaagagtctgccgtcttcattcattccgaagtatggaacccaagtgtgttcctgtttgtgatacagctcatattgtttcttgtttttgtcggtgaagtaaaacccaaagtaggttggattttcggattgggaatacacaaatgtatggaccttaataccaaccagctttgactttgacaacacatcttgaccattgtcaaccactgaagtgagtgtagaatggggtgaaacaaagccagaaacaatcgaaacgccgttgtagtagtgcgtccttagcttgaagtgttctgagtccttatcaactgcagagagatcaaggacaaaacttgagaggttaaggccggaaatgtgggtcaaaagacttggaacattcttcatggtgtagtactcatgccattcaccgccggttttgtggaagaagtcaaagacctccttgtcatcaaggatgtatccaacgcacaacaagcttgggtcctttggcggggagaagccgaacctaacgactctggcattgtcaaagttgttccacaccaacaagttcgagtccaatatcttgccaacatttgtgttttgtctggttcttcccaccataaactcgtaaccactaagcgaaccttttttgagagtgtattcttcactgaaagattcatgggtggacaaattaaagtcaaatttgcgcattgtcactggacttgaacgtttcacatctgattcaggcttcacatatgagtccaacaatttcatttcttctgacgcgttatgtagcataaccttcattttcaggtacttcgccatatccaggcccattgtctgccatttgtcgtccttcttagcaaagtagtagtgcattgaggagctggagtccatggttgttagaagcagtacgcttggatttaggggcgaagtgagagttagtgagtcgaactcagaacttccttcaaaatccatgaggacctgggaatccatcattagagacttgactgcgtaagaaggattagacttgacgtagagataactcatatactgagagtttttgaaaactaaatcaaatacgtttttgtgctccacaacgcgctcgtcgtcaaagacgtaggcacttcccttgtgattgggatcatagaagaaaacaaactccttggccggtccgtcttcgggtgtgtacacacctgtcagagttaaggtcaaattgtacttgctggaatcattcattcctgtaggggtggaacttaccagagcagggttatttgtcgcaaacgtctccagagttgagtgtatcttctttatagttccaaggcttgaaaagaacatcagttgcctttcctgccagagcttgttggggttgacaaacagcttctgagcagttgactcgactgaactagttgggttgggtggtgcagctggtgttctaggaactagtttggtaaagcttgtgtaataatcattattttcatcgtcgttgtagtagacaattacggtgtctggattgagttttggggttatcatgagagctcttacagtgtggaattgagacgagagtgagaatagtgtttcggtgccacacttaatgtgggagagcttattattgtttaagggtataagtattgtggaatcatcgctctcattaaatattgagtaaaagcccctgaaaggtgtgttcctaacctcagaatcagtgctaacgaagtactctgaacgagttaattgtttattaggaatcatattgtccccaaagaagaatcctgtagtataatcgtaacactcgagcctcaaggatgtgctgtgagaaacggcctggtcaaacttaaacttgagaaggttcgcatagctcgaggacaaaggagattcaaaccactcatcagatcccttagattggtctaattgtttgcggaaagacactaactttttgactcctaatctgtcggataggtacaagcataatgagtccggtttagtggctggtgtcatgtacacagccacaatcctatcaccataaactttgttcctgcgtttttcatcggttgaggcgctgtagaggacgcggtcagaggttttaagaaccgttgcctcgtacccctccttaaccaccaggagcttgaagctgttaaaagtgtcatctttcacagatgagtaaaatagggttttgtgagaggagacatatatgtccatttcatcagtgagcaggtcatagttgaagaatacgggagatgtgtctggaaccaaaactcttccagataactttaggcctgtcctggcaccttgttccttttctgtttgtgaaaggaagttggagaagaacttgacagtggtgtcaagtttgccccttttggaaaggtttgacttagtttccttcaggaggtctttaagggcagaaacctccttgtcggtgagtgagactctggaccatttatttgtgggatctctaacccaggcatggctgtgaacattggccatcaaatcctcgaacaaaacggttaacctactaaccttcccgtaaaagtttgtcttgttgttttccacagtcaaatagactccaagaaccttctttgtgtttgctgcgtcggtttgggggtcagcgtttttgaagaagcaatgtttaccgtatgaaacatttgatagcttgaagttatcgaggggtaagtagaagtagtgatctttctcgggttggtccacgaagaaatgtttattcactgagacactctcgaaaagaatcttcttagacttagatgagctgcggtcctcagctaggctaggaactggggtgcctgtgaaaacgacattatcagacctcagttgtgcagtaacaaacttgagcttaaccgaaactaggtcgttaaagacgagggtggtgtgagtccactttcccaaagatcttgagaatgacacgtacttgtcaaagttattctcggtgaaccaaacatgaagttttactgggtcctttgcgggcattagcaatactcccttaagtagtctagggttggtttgggtgcttgagacaaaaagctgtgagctcaaattagtgcaaagttggagttggctttcctggtcaacttccacccacttgtctgaaactttgtgtagatattcgtttttggaaacggactcaccgttttcgagttcgaccttatacgagactaagaaaagatctggatcagttgaagggtagtaggcaaacttttcaaccaacttccctttggggtcccagacctccaaactgccctcaagaaccttggaaagtgttccctgagtcaccttcacaaccacgtactccttgtcatcgattgtatcacaccgaacctcgaaattttggccagtaaacgcaccagattcaaggtcgtaagaaaactctttaacgctagtgttatagggtgtaccctttgtcaagtctagtaaaacttcgtcgttcacgctcaactttgtaatgttgtgctctggctcgtccacgaaaactagcctatagtgtttttcgtcctcagtgtaaaacttgaatcctaaggcagataagccagtttggaagttattagaatcttgtggaagagccacattcttcaacaaatcgtacttaaattcaagcttttcttctagatctgacatcttagtgtgaccgtgtagcataaactttcctgcacctgcaggtaccggtttaagtgaaaagaatgatgggtaagtctccatcttatcaaatggcgaagttgataactgaggattagacggtccaacggtactgggcaatgataacatgggcgatttggttagggaaacttttggttctttgagtgagtgtggctcgggttgatcgaaatcgaagaaggcgaagaggtgatacttgataatgttcttcattttgtacttgactgtggaggaagtggtgacccacttgtcttgcttctggtatagttgaaagaagttgaagcgctgctcgcacgtgtagtgagcgagtatgtaagtgggattagtcctaggggatattaataacgccttcaaaactctattctctcccaactcaaacaccaaattacccttatcatacagcctcgtgaactcatgtccgtttgtgggcgcaaccaaataatagtctaataagtacaaattgcccgaataagtcctcattacgtccttgaactccttagaatcagtgtcatagtctaaactgtacccacttgtagaatctttgttataatccacaaagtacaataagttatcgggattctttccatggagaactagtgttgagtggtgtaaatcatctttaggcaagtcagttttagttaactcagttttacatatatcaactttagttgatccagacggttttgtgtattctggggagtttagatagtcaaatagagcctttttgaaggagggataatcgcgttgagagagtccataggggtagaagctgacgaagaagtagttattgatcagtgacgggctcattctgtgtgagattttgaagaatctgggtttgtctagggggaacactgaaaagctgagtatcgggaatgtaaactgtcggtatacaaccttctcgtactggagtaggcgggagaactcgaagcctgattttggctgaaacttcgtaaagtgaactccggccaagtcctcagtagtcatatcatacttttccttgttaagttcgaggttgtcgacgtcaaggtcaaacggttgcttcctctcgaaatgatcgtcggcccacttcaggcacatagacttgaaagtggcatcgtcggttatcgaccaaacaccaccgtccaagtaatagtgatttgtattcaccgaaaggtaaaatggagaagacatatccctcccgtcgtaattgggctcataacctggaacaccagctaaatatgcataatcacctgagaacgatacagatgatggtggagttggacctgagacaggttctggtgattggttaggtgaatgtggagagtctattaactttggtagggcggttggaggtatgatcatgttgaaagtacttgtgtaagtgattgaaacaaactttggatcatgttcgggagaaaatgagaccaatcttatatcctcgttagaagtgggttcaaacagaactgtcaggtcagaatttgttggatccttatctactgtttttgtgttagtattgaagttgaagggtccaaagtcaaaatcattgaggtcggagtccccagcgggctggggtgaaccgaacaccacctttgagatcttgtagtcccagcgtggggagacggacttgaacgaaagcttatgcaggttcgcgtagtgcacattgagcttttgggtctggttgtggtagtttttggtgttggagaggtcaacagactcgaagtcttcggatgagtgggaaaagtatttcttaagcgaagacttaaactcttgctcgcttgtacatgaccagaactcgttaactcttgagaagtagaagaagtgaaggccgttgccggtgctaaggagaatcttcgcaaacttggggcagttgattgggtaaacaagtacagactttagattgtcaaattcgcccttgtcccaaaggtgcgagtccttatataccaacttgactacgtcaacattatccctgggagatatcttcatgaagtaagtggtgtcctcgtatagcaactccttcttaaagatggttgacgagtagcggaccgagtcgaagtgaatgtcgagcacaaatttgttaagcttggtaaagagggttgagtcgtttgtaaggtcatgggacaagctctcaaattcggtccaaacatcgtttttaacaaacctgcgagagaaaacgccgctgccagagtccctgaaaaatagggtcaaaaccttcggatcctcagtaggggcaaagtacacatgggttacaaatctttcattgccagagggagacgattcattgggtccattggtccaaatcgactgatccgcgtggattagttgggtgaggaggtatccgcgtttcagccgcaggactgtcctgggtaccgttgattcaacgtagttcttaaccgtgaacctgttgttttccttatagttggcgaggtcgagggtgaaatgctcgtagtctgatggtggtgaaagttcctttgtgctgtccatgaaggtgccgtaagaagttccaacagataactgggccagaactcgattgtgcaagtcctttgtggttaaacgtcttggagagaaggccgttgacatgctacccattagtgaatccaaaaactcattttctccaacttcgacccaagaacgaaccttcttcaggtacttgtatgtgatgagtggagtttggtgatcactctctttcacgttagtatccaatatgattatgaggtgatctggattgttcggctgggctgagaggacgtcgagaattcgctcacctgttttgatctcgtagacgtacattgatttgtcggtgactgcgacaaggttcttaccgggctttggagtgcagactccaaacctgacaccgaaaacgtcagtgtattcataggtgtaaaactcgctgggcaaagacaaatttgagtcttcgaggtggtacacaaatgcattttggaagtcaagtaaacgatttataaactggcggtgagtgttttcattatcaagaatccagccgttaagactgtctttgtagtataaactggacttagaaacagacttttcagaataatataccaacaaaaccttagggtcttctggaggtgcaaaatgcagcgaaaaacaattttcaagagcctcactcctccaaatcaattcagagtcagccacatcagaaaccacgtcactgttggggtcaagtggtttggagaagattttggtgatgttggttgagaggagtggatatagggaaacgattttgaatccgtatttggaataggttgagaagatgaatttagacttgtcataggactgaaggtttagtgggaaagaagagtcaagcatatccaggtaataggacataaactttgagtaactctctttccactcaaaacttgacaattctcttttaaagtccttcagcctcacgtaacccttgaaatctctgtagtacacgaccaaaatcttgggatcaacagagggtgtaaagtaaaacttcacaagcttctcagaaacagaagttgattcgtcgtaatttggagtccaaatctttcgtttgtcaatggaaattgagcccacaagtgtatcattgttgggaagaactacagtggtgtagaggccctcgcgctcgaaagaaaatacagtcaaagtcgagtgaaccctggtatcagtcaaatcaaagtctaagctcctaacgttcctgtcgaaaacaggattgctatatagtgtagagggtttccagacaacctcgtccgaaggcccggatccgactgtcaacttgtaatactgagagtaaacgacattttttaataggtccttgtaatgtaccatcatttgattggggttctttgagggataagaggcaattgatagggtctggtaatgcgggcgagcctcccaaaccttggtctccttgaacatcacaggtgagatgttaaactcgtagttcgggtaaacgagatcaaacttgtcgttgtaaactgttacaaccttctcttcatagctgtcctttctgtaactaggggatccgtgcctgtagtaggggtcgaggttgtaggtaacctgagtgcctgcgctcttggccagggacaaaaggtggttgaaattctcctcagttgtggacttgtaaaagccatcctctagaacaaaatatgcctttcggacctggaacaacatgtcagtgttgtagtagagcctcaaaagagagggatctccgtcagtgtattccacatataacacagacgtgttctgtattgagaaaacttcttcaattgactgaactgatctcctatgcaaatcagacaatttgacttccttgaaagggtcgaaaaggttagaggaattagatcttacaactttccaaatcttgtaactgtcttttggagttatccttgtcattgtgatgttcttgttggagcggtcagtaaaaatggtgaagaagttggggttaggactatcgaggtcaagcacaaccgggttcatggtgaaacgtttaagcaagaaaaggaacttgccgtactctgagcttgaaatctcttcccaatctccctcatcatttttcctaaagtatgcctgagaaggtacaaagttcctcacaaagttcaaagccaagatcctagggtcatccttaaaggcataaaccacactcaacaccctatcggactggtctgaaacaccagattggtctgcgttgatgtcgaataggaccttatcatcgtgtttaacggccgtaatgtaggttgagaatgagggcttgactatggtaaagagtagtccgtaaatcttcctcctatacagatttatgtattggttcatcataaaatccttattctttacggtcttattcaacaaagttgacaagtcaagggtaaagggcatcaatttgtccttattcaacttcagggtatccaaggcgtattcctcggtagtcttcacccatttattcatactagacatatatctataacggtgtacaccatcaccatcgggattactatagtatataagtgctagtaagggactattttggggatatagtatgaggtagttgacgagctcatcttgtgcctcccagatagttgtcttaccctgagttaacagtaccagatttctgtctttatttggggttaaaattgcataagctttagtggagactgtatgatttgaaaccctgtagtcttcagtggtgtgcaggtcggttatgtccactagaaactctttcacccccttcacggtatccagcaatgagttgtagtcgaaaacgttgatactctttattagtgatattttggataggttgggtgagttggggttaactgcattggtgatcttgtagtatttattaaggattgatgagtttgtatttgaggtgatatataggagtgtgggcctaaggcgtgggacgaatgtaactttaatcacgttctcgagagcgtttttgaggccaatttgtttggaaattccgttatcagtgtcgtatattagaatagagttgtaatacaaacgctttatttcatatcccggcttaggcgttagggtattgaccaaatagtcggggctgaactgagatgtagtaatattgaagccgtgtccatctctaaggtgaaacatgtcaaccgaaacaggttttgaagcgaagtccaccagagcctgaagtccgcggcggaacgaagtcttcagataggaccaggagtggttccacttctcatagttaagcgttttcaactcacgcgagtggccatcagtgtaatagatgctcaagtaatagtcgttattaagagtgaaataaagctttgtagaaggataaaagttaagacctgttataatctgaggtccatcgataacacccttaagaagataatcagaattcacctcagcgaccacgaaattaactcccaaataattgtacacagaatgttttaaaggggaatcacctttagttaagttgttggttgggttagatagtttttcgtggatgtaagaaactaaatcacgttcgtctgagttagtttcttcaaagtccttgaccattttgtagtaggtggacagatccagagttgtgtaattttttaacattaggagcttctcgaattgattgctgtagaccgactcattaacctcaacatagttagttgttaccttaacgaaaggatcgacatcaatcaagcgcgagtcgcagaagtaaagaaagttggactctaaaaacccgaattggtactcaagtgatatgacctttggtgcgttagagggaaagaaaataacttccttgaggtagtggactctagggaacttgtataggggttcaccgttaacgtacagggataaattttccaccttatcagtgaatttgagaacaccgtagtggtccaaaccaaaataacttgagtcgacaaattcgtagtaaactctcttctcgcccttgaaaacatccgacaaatcaacaatctcctctccctgataatactcttcagaatatttatccaactcccgaaagtattcttctgtactaacacctttccaagacccgtcagggactttatggtagtgattgaggtagatgtgtgtagattgtgacattgtgactacgattgagaattttggatcattgtagggtaagattgaggcgtatacaagagtctcataacccctagtttgtttagtgccatctactttgccgtaagccgtggagttttcagtgggaactgaggctgaagaccatatggtttcactgccgtcgactagcttgccaaccttgtaaccataggatggctccacaaaggctgttggaggggaatcaagatgctcgacgttatatgtgaacttgttagaaggagccagtttcccaacatcaagtgtgaagtacttgtggtcctggacggtggatattgcgctgaaatagtcctgcgcctcgtctacggtgactttattccacctgccccttactcgggaataataagaaacccttaccacgtcagcctcgtctgagaacattaacatcgccatgctgggctgctccgcatagttaaactccaagaaaaaaagtttgtagttaagctttgaggaccagatcacgttagaaccctctcgaaagttagccagatgagatgcgaatactggataaattcggaccattggtacgtctttgtgcctgaataagctcaaagtataatttttgtactttgcatcaagcttagtcttggggaaggagttgagatcaaagggaaaaggatgctctgatctaacgtaagttataaactcagccaagtcaaagtcaaacgatatcttcatcaatgcagagtacatcaatgaagaatgaactgcctgggatatagggacccagacaagttcattattggtatcaaagggagcgagtgacattttttgataatacaacaaatgggaagtgttgcttaatggatcttcaatgagtaaagaaatgaagttaaaactgtttaaattgacatggaacacttttttacactttaggaaccgagttgagttccacagttcaaactcaagttccttaaccttgtcaaagtagtagccatcaagagcagtaaagtttgtcactgggacaccatcgaccttgaagatggactttgtgcagaaatccaaatctgagatggcgaggtctagaacaactgagatctcgtcgttgttcaacaaatgtttgtaattctcgggcgagagtgcgcgccattcaccaccttcgaacccaaaaaacttatactggcatgcgtcggagctgctggaggccaggcagaggtccacgattgtagagcctccgctcaggcggtaaaggcgtacgtctctacaatgcgatttcttattttctgaaacccaaagaagagagtcccctgactttacaaccgtcaagagagcatctcccaaagggctaagcatcatcacattcatacccctgtactccttcttctcgaatttaaagttgtagtatataggagtttcggagacagacccgttcaccaagtgaaggaggtctagagtaagctttgggaaacgcctggaaaattcggcgaactcattcctcaatctatcgatttgttcctcgtagaatgtcgggtttactgtttcccaggcaaacgacttattcctatagaagtaaagagtcctgtcaacgtagtatctggtagacttttcatcaagagggttgtaggtcatgtttggtgtggtcaaggtcattttgaccaacacaagtttgttcatagtattgtaggagagagctgcgctcttgaagagctcagttcctccagaactccagaccagatccccgttatggttcacgcgagttacacgagaaagacggcgagcaaggagaagctcacgtgtcactctgtcatcaagatgagagacagagaataaggaatctgagaaattatgtaggtctagagttgattctaaggactccatctcgtcctttaatacatcaaagtggtacttcgtcagggggtaccagcccttgtctctcttcgtgaaatacaaattactaaagacaaccttttcaggtaaagattcagtcgtattttggtttaaagtttcctccttcttggagtctgaaggggatggagtgcttttttccaggagcgcgaggtggcctatggagttgtggcccgacctttggtggatttcgaaggatttcatggagaaatctttcgacaaaggggaccatacgctgtccggtgagtcggtgactctattcacgtatacgcccagcttgggtgtaaaacgtgtcacagaggccggcccagcctcaaaagttaccacatcaaaattgtccgtagacgcgctcgacaggtccagctcgacctctgagccctgaacatagctggcgaacgccagaaacaggagtagctttctcaaaaacgccatccaggctcagttcattatttctgactactacacctgtggggatatttatctcgacaacgctgggccagcctagaagtaccaaactttatattaacctccaaattttgctccaagttttccaaattatgtgattctttaagtttcctcacctgaatgttttttgtaggtcctttataagtaaaacaatttacacagcaggacaccaaactgtcatgacattgaaattcctggacaaatccctttattaaatatagaaaactaattttaattgcagtgagctctgtctaagggggtaatgagtaatcttaccaacaaataactttcgttcaaccgattacaccacttccactttacacattagtctgatttaagttttttcatttatttttttaataattttatctcttttttaaccaaaatagctgatcacaacatcaacttctcaatacgtcttttcgttctctaaattgcttgtttttgtcaagttctttaattatattggaagtataatgatttgactaattattgaatatttttacctaactttttttattatatttatctccaacatttgtttaattttataaataacgaattcttctaaattaccttgttattctcccaaatttattttggttacaatattctgggttttccgctcagtatttcaagtttaaaacaaatgttttagaaaataataatattcaatcgaggataagtttacacaatgtctgtttaactagtttttgtaatgaaacagtatagattattttttaatggtatgaaagtgaattcgaccggctctagttcccagaactatggtatctagaggttgaaagtattcaagtgctgtgatgcggcccaggtttgacgtgctattgggccagtttgccaccacgttgtagttgtcattgtacaccaaacgcactgaatttttcttgtggaccgacgaaaacagtccgaattcctcactcaacttcaaactcgttatttcagttgttaaattatccagaacctacaattcttcctttacaatggggtatacaactactattctattctttaccaatatcaaactattaatatctgtgtaatcatgtgtaactgatgactagttgtaaaggttgggaaagtaatactttaaagggtttatctgagtttgtacggtataagttaacgtagcctgattttgtcccagttgcgaaataagaattgcgatttgagttaaaagttgaaaatgctgtgacatgtacagaatttgggtctttaaactttcttctacattttccacctcttacatcaaactcgtatatctacacagtatgattcatactgatatatgtaggtaactggttaaataggtaactattgtgtaatgaattacatttgagtctaaatcacatgaaattagaacatcgtcgatgaatcccagtccctatagttgatggttggtagagttaaacttacggcgcattcggaattcattttaaagttgtggaccagtaaattgtccttgaaatcacacaccaatatggttctaaatgttaaatataaataaataaatgtaccctgtgttaacacatgggattgcataatagtttgtatgttttgaggtgacgatttgtttataggcaatctcagttcgaggaaccattacattaaatatattctgtcctaaactacaaaatgtagaaattgtgtttacccgctttttacatcatatttgagtaatttcttatttttccctatcagtaaaatattattatccttgaaagcaaaatctcgtattaaaaaatcatcgaagaaaagcgttttcttcgacttcagcttaaacctttccctgcctcctactgtgtagagctgtaaccccttctccttgtggcataaaactgacataaaccggaaatcctcatcaaatccaattgaactgacctcgccactataatcataattaatactattaaagtataaataattagaaataatatatattgaacgactctttccagtaatatatagataattaagtgaggagggatatctacataatctagtgagtacctaaacttgaatgaatctttagagggttttactggagtaattttaaacctcgaaccggttttaaaggcacttggtttaaccctagtgagtggtccagaaacagataaataagcttctgaaccaccctccttcaagatcaaacgcctcttctgtacccatctaggctcctccaaaccaggagcttcagcatcgtctggatcttcccaaactctttcacccatattcatctagtattacactctgatcaagcttaaatcactagtaataaaaacttaattaatcttaattaatagcataataagggtaagtgatgagtaatttgatagatgaattagagctaaaataaatataatttaagagggaaagtacccaaaattggaaatttaatcgaaaaataaatcataaaaaaattaaaaactgattcttaatagtttttaaaaaataacataatataataaatcgaaatataatataataacatgtataatacaaatgataaatagtagaaggtgatggaaggaagttgtaaggttataatacaaggttcaatcacataacaagatttacagcgatattaaaccaggaataaattataaacaaacaattaataaataatataatatcaatggtgttaaataaaatgagttgtaaaatgtgtaatatcaagtgtgtgagtaaaagggggagaaggaaaaggaaaaaaacaattttttattaaaagcaaaattaataacagatgttgatctggctgactgcttttaaagaaacaatgtggctcagcagcagtaatggaatctcatgatagggcataggagaaggaataatgaaaggaatatgactaattggaattcttaaaatattaatcaatatataagtgttttggggattagttttgaggatttggtcacttatcgccccgtatagatacaagtacacaaaagtacccgtagatacaggttgctagatctgaagtatttgctaaaatatataattaaagattgcataataactttcataatttaaaaaaacttttttttcaagtaaaaaggataagtaaaggattatttttccaaaactagagaatcatactcgacaacagttaactttcaaaaacctcaataaaactttaaatcaacttttaaaaatctcaaattaaacgtaacaagcaaaatggtgatgacacttgtgagactcttgtggataatattcttcagtctctgtggccttatcttcatcacaggactcattttctcatttagagctggacaagaatgtttctcctgcagaatccttatgatttggataatattctttatattctttgcatttgctagtgtttgcctctttttcgacatgaaacctgaatatgctcctccattcctggatttcttatacgacacgaaaatctttggtgaataggcattaatcgtaaaacgagggaaatgatgttcttttaacttttttaatattattccacaatgtatattacacccttagattatactagaccttttagttagatggaggtccattaattagatatgttgttaaataaatttacacaaaataatattaatctgatgaatgaatcagtgaaataataatctttatatggcattaatgaaaacaataattttaaaataatgtttatgaaaataagaattgtgtaaacccgatctgggaattgacggtgaataaaatttccaaattccctgtttgccttatttttacttatttttaacacattatatgttataaggtttattacactaatttccaaacgtaaataatagggatttgtaacatattgtgattaaagtgattccgatgcctaatcgagtttttttggagccttccgggatcaaaccatgttatgaggagtctgatgataacaatatcccgatccttgagaaggtgaagaatttgcaggttaagtttctcaagaaaacgcctgaattttcggtcgttgaaatcgtcggtctagacgtttccttggcaaacgccttaagaaggattcttatttcagaagttcccactctggccgttgaaactgtacaggtacataccacttccgatacttctgagccctcttccgcatattacttatctttatattatggaatgatagcaaatacactaattagttaatagttatttattatataccattataagtttgtctagtaattatgtgtgtgtagatataccagaatactggagtaatccaggacgaattactggctcatagacttggtttaattccctttgcaattgatccagacctttttaattttaagagtaacttcaagactagtcatttgttttacagattgtgaggagataaatgataaaaatagtgtttgctttaagctcaaggttaaatataataagttcgatcaatccgattatctttccagtaattccgttaattatagttacctctatcccatatagcatagtctataatactaggtgatgtaaaatgttttagtatatagtaatgatttggaatgggttccattatctaataatcaggagttgatgtttaaggataatcctccgaaacctgtttatgatgatattttaattactaaattggctccagggcaggtactacaaacctctaaacaattttccactccagccatactagttttatagttatttcacagctttgattctttctattatattctgtatttatttccaaaaagaaatttcgaccataataaatacctaaatacctttataaagataacattattggatgtgtaatgtgttacaggagatagatttgaatatgtaccttgagaaggggattggtaaagtacactctaaatggtctccagtctcaaccgctgtctacaaattcatgccaaaaattggttccttaacaatcatccagttatatactcatggttatgtacaactactagtatatattgtgttgatgtttgattagaattttcaactgagcataagttaactgccaatgaaaagaaaatgttaccgaagatttgtccaatgaatgttttttcattttctaaaggtacgttgtgctcaatcaattcttgttagcttcttatctattccctcatttatgtatataatactaatatctatgatgtataaaatgtcataggagaagttaatattgagaatccactgaattgtactagttgtcgtcgttgtttggagttatacccgaagaagataattatttcaaagctgaccaatcacattatttgtacttttttactatttaatagttgatttagtttctattgaaagttccggctctgtttcaagttataacttattactggtaacactccgttgcgtgcgggcaattcctgccacaacttacctactcccttagttatttatcccttccttagcacttcgttttacactctctacatatttttaaattttctacatatttttacattctctaaagtgtttcacaggttttaattgtttttttaattattcttaattttatgtgtagaaagcagttgagattttaaagaataaatcgctaaaacttaaaagtaaactccaagatatttaatttgctcagaaaaatatttatttatctctatattgtgttctggaaaactttttactatttgtttcactaaattgcgtatagtgactatagtatattatataattgagtggtggaggtgggagtaaaatggttataaatcatcgatatcgaaatccgactcctcttgtgactcatcctcaggttctgattcagacgatacgtcctggaagtcaatgcagttgtcggcctcgtcgtcgtacacgtcagtttcgttgattttggtcgcttcaggcaactcgccgtaagccttcagagtacgagcctcctcagcagtgtactttgcgatcacgtcagccttgctgtcctggaaatctctaagcgataccaaaataatatcgccggcatttacccaaactcgcttcctcatctttcctctaatccattttttaaattattgttaaccatatgtataactaatttattagcgtaatagtgtaaaactaatactagttaaagatattaggtgaatggtagaattagtgtagtaatgatacctaatatggcaaagacgtttagtgccgtcaaaacagtaggcttcaagtctgccattaccgagcatacgtaaaacttgagcatattctaaaaatcaattattaaaataggcttaatgctgtaagatagaaataattaaggtacaaataatgtaaaaagtataaaaataccttgatcttccattttgaagactaattctcttttttcgccttcattgtcatttttaccgcgtctccggttctttcctcctttgcctgagcaattatttcaatgaattaaagttccaaacctttatttttcggcatttttcaaattatcttataaacttattgatactactactataaatatattatttttagtgagttgttttttatcgagtacttaagattccatggggaaccacgatacacatgttctactagaaataactaatttcgacacaatctcaacaaaaaataatattcagtaaaggataataaaaatcgggaggaatattaaatttggggtgaaaatggtaaaagtggcggaaaaaaatcaggatgaaaattgtgtatcaagttggatttgttttgatctagcctcgtggatcatcttctccttctgaactaatctagagcactggtcaaccaattccatcaacctacaacattttacataccttaacactaagtatactattaaacaacgtcattggatgaagaatatgtaggtaaataaggaatgtgtgagtaaatatataatttgtttggtactttgtaatattgttgacccagttgttgagtataatttcagtttgtagtttcttttgaaatttaacaattcccgttatacggttgattttactatcaattattcccatctccaccatgttactaatttcattctccaatttctacaaccaaatataacaaattatataaccggaagtaactaaaaatagtaatattagtggtagataactgatttactaggtaaaagatgtatagagtgtgtaactagtgtaattgagtagtagggatttacgtctgaattaatgtttaatagtgttgataaacgctcgagggttattttgttatagtattttgaaactattttaacgttgtgttgaattatccggtcatataacaatttactacatcgctcgtccaacatactgttgatcttttcaaccagtgcatcgtcaagctgatgagggatgaggaagttgttgagaaattgctggaaaaaaggagaaacagtcaacaactgttttatgaactttttctcatcctcattcaccttcttcatgtattctatattctcttcgttcaatgataataatatcaaatataacaataatttctccaacacctatgaataaatgtcaaatatatataaatgttaaatatgattaattaaatactataaaaatagtagtgtatagaacttacggttaaataatcttgatagtattgttggtctatgttactgggtgaatcatcagttgaattggtagagtctagaaatagttttttcttggtggagtagatggtgtagagtgatttggtgacgttttctatatcgaaatcgtggtggtaatactgtatcatgaagtcatagaactggagcttctcgggaacataatcgtccaaagcagactcggttatcttcttactagtcataaagaaacgaatatagtcaccgttaagcaaattcactcgcatctgctctaatatatatcttatcttttccaacttattcaaactaccatacgtctcaacctattacaattttacacaaaccacaaatatcaacatgatagaggtattgtatatatataagtaaataactgaagaccgagtccccgaagagtggaattgcctgtaaataatgaggtacctcaatattctgtaatatggaagctgattctttaatatttccctcgtcttccttaagcttggcaagcttaaaaataatctgagcacgctgcttttcaaggtaaatcttcccaagagtaatcttgtcgagagtgttaaagagctcgagacgaacctcaaggcttggaatggagtcaagccagcgctcagccaagtcaaccatggaaacaatcgtggtcttcaactgcccacgcttcttgcatagtaacaccaagtagtagaacatgttattaaaatcattaaaatcgtacaaaagagtcaagataaagttacaaattaaagaattagactccccgtcaaatttctgccggcatttcttctcaaccaacattaactccagtaataattccttcaaaacctcttcatcgtaatttttctacaagaaaatgttactaccgtgtaataactgggttaaaatggaaataaaatcaatattatagtagttagatctattaaaagtaatatatagctaattatagtagtgtaaaggagtggaatggtactggaagtctaggtttaacggattccaaagtgttattaacgagttcagagaggtcttccaccctgggtggatccttgtaataactgtccttgtcaataattccataactctcatcatccatcatttttttacaactggcactcactaaaattatctattaatattatttagtgataatagtagaggtagtgtcggttatgtgttaacctgacaaacaccagtaattattcttttactggataaattattataataataatgatcgtattttagtttggaggataagaaataaattttgctaaatttattcacgagtaatgttggaagagcttaatttaaacgatgagctcaaatcactcaaaatctcaaattccaattcctttttaccacctacctcccactccaacatcaaaaatacatctgataatataaccacagataatacaaataacacgaatggcacacctgattatatgaacacagatattaagattgacgacattaacgcagtaggtggtgatgtggatgatgatgttttgttaacaggttataatatttttgttaagttagagaaaccaagtccagatactgtttcttacactgacctcaccaatgctactgaccctgccaacactcataacacagttagtatggagaacacttttgaaggtgatgaaacgtttaatgtagttgaggaggacaacacagttgagaataaggatgagaaaaaaagtggttggttgatgagtagtgcgaaaacaacaccaaaagcacattatgttaaaaacttgaaggatttgaaaaggggtaaaaaaaatgaaatacaattatttcgtccaaaaattccagatttgtcatcgcaatcctccacaatatctgcacataccaataatacacgcttctccaacaactcccataaattccataaactcagttgtcagaattgtaataaaaacaacccctataactttagactggataattataattccataaatccgtatgttagtaaatatctacggtgtaatcctgttttaagtgatggctacactaatgatttcgtctgggataacaatgaaagtaccaagaagagcaagtttattactgagagtataaacagttggctgaaaacgatactgaacataatcgtaactttcatcttaatttatattttaattgtcatttttatcattttaaggaaagatattattaatcatattaataataataaggccgttgtacacaataaatcacaggtacttctttcccttcattacttacattaactatataatatcctattgccatagtagtatgtatactagtcagattctttagactacgctagataactcaataaaaatgtgtttagatatgttttaatgagtataacaagaacaaatgtaatgtgataaagatcccagcaatggaaagcaagtgcaaggagtgggagctgtgcatgaagaaggactcgttggtgtatgaggacgtctcctcaatctcagtggagatcataggctcactgataaataaactgattaaccaactggacctgaaagccatactgtttttgataataataatcctgctaatcataatcatcaagatcaaaaacagacctaagccggacaatcgcaaccataaaatgctcaacaaatattacgtcccgaattataaaaatttctacccgtacacctgaatgtcttatctcaatttactcactacttatcttaactagtgttgatttgatcataattagtgaatatacagaaaataatatattatgtggatgggctggcaaggtttctggtatactgaataattaatggtctcaaaatacggtctattgggatgtaaatcaattggggaatgagctcaatcaaacagaagaagccaaccaggaaactttttacaaggtttacgtcatccagttcgagaaaaacgtcgtcgtcgtcaatcagaccatcgttgacttctatggcgcacaggtgagtgtaaataattgatgtgcaagcggatctaaaaagggagaacaagacagtgatcacgattccagaagcaatcgtgaggaaaaaacaattgaatggctttgaaggaacagtaacgtcgagaatcatacccagaatcaccagagcatatatcgccgctaatatccaaataattaaaagacgcgttttcaatttacgtgatatagttttacaattaccacttccattaacagttgagtcacttatactcaggtcaattacagttttaccaccttccgtattataattggttaccaaaaggttattggctgtgtggttgctgattgttttattttctgggaaaacgtatggaaaccacgtgccaatgaggcctgaaacatcccgtaagatcaagaacataacgaatttccccaaaaccgaaatctcaacttcattagacaaagcgtgtgcaactaaaacattttacatcacctctaactacactaataactaatagaatactataattattactaaattttggtataaattgagatatagataactgtatatattgcaatatagataactatataaattgcaatatagataaatgtataaacgtatatatagtgcttagaagtgagtgggttgataataaagtacctaagaaagcccctgaaaatcccgataaaaactgaattacaatcattagaataacatatggatattgcgttattgttaactttaaaactctgacgaattttttcagctgattgaccactttagacttcatccaagcaatgtgttctttgtccttggggttagtaaaaaaatatatcaagcaaccggttgttattaaaattggaagtcctaaccccaatttatagccaactattttattggtattgtatttgaacttgtccatataagagggttcaggagcaaaatttgcaaacggaccaattaaagacccccaaaaagacccagccctatggcctgagagcattaacacaatcttggtcaacggctttccagctataaatctatcagtaacaagagacattccaatgatctttaaggctcctatgcaaaaggaacaaccgcttattccatttaaaaacatgtatttcaaacaattgtttgggacggaggtgaatccggaaaccaagacaaatagaggcgaaacagtcagaaagatatttccaaacaaaaataatagtatcaatttgagccaaaatatgcttactggaaagaacaaataagctattagatggcctagaacgtagaaaatttctatacaaataagtaagtctgtgaagaatgactcactctcagacatttgaagttggagcattgctgataatgctctggctaagtgtgttttgattaatttacagaaagttatcagaacacctagaagaaaccaaaatgagtaactaatcaggacatttcttttggtcatcttggcctcagagttactctccaagttctgaaaatccataattgttaattaattactgtgaaataatttaattaaatatgatatttgtaaaaaataacgaagtatttaataagttataaaaagcatctttaaaaagcaccaagtttaaattcccatacagatgcattctaccagctacatttttcattccagttttcgcccactttattcacaattattggttattttaaggtatttttattaactttagcctcaatttattcttaattatactataaacaagttttattataccatatacccataccatacctaatatacaatatgtatagatacattaatagatacatatattatatatacttaagtggtatggtagtgtgaatataaaataatatgaggagattataaaagcttagaatatgttaactggtcattgcttggtatattattccacagtttcttagtcttgtgatgccttaggcctggctttaagtacagtgatttcttacacaggataccacccttacttatcagtaatatattcttcttttcttttattttatccacatttgtacaagataccgcctcatccaaatttgatgaattgtcgcctccgctctttttaattgatttctgtgaattcctcagtatgttatacccttttcctttaattttttgtaacttgatatcattgatattaattagtttatatttgcctacataaaggttatggcgctggtgtttacccttggaggttaagatgagtatgtgttgttggtcatttgcaaggcatgaagaaacaacctcgtcgcctttgtgtaatcttatcagcttcacattctttttcttatcgaacttctccattatactccttaaacttatttttatacaatatcctcttttagtacctaaacacattttttacatcaaggtatctatgggtattgtaattaatagtaattttaactaaataaagcaagagtaggtccccaggggaatgaataactaaggaagtgcccccggagggatgcacaagccgcgtaacgaagatacaaatgaaaagaaatgggttttgtgaaatgtgattaaggttataattgaaaaagaacttgatttctttatttttaaggttaagtttaaggttcagcttagtctttgatagtttcaaattcagcctattggtattgcaaatagtcattataccattaccatatccaaccattattatatctgtacacattttacatattaagataggggaattaactactaattataaagtatatagctaagtaaatgagtattagtaagtccaatggaggaataaataagtaaatcatcaggaactaaataagtactagataactaaggaactaaacccccgggagggagtacaaggaccgtaacggaatacctccaagatgttttcctattgatgtaatatattcaatcatttcgtcatttttaatacccaaatacttgaacatatcatagcctttcttacagagtttcagtttactgctattcacatgcattattctgccgtttttcagtattattattatcttattactgttattattactgcaataacccacttccaacgccgcagcctcatcaattttagtctcacccttcttagcacgattattcttatttgaatcaggagttgaggattctatgctcgtatcgggagtggtggaatgggagtggataggattagaaatgcgtattgatttatttttgttggatttgtagaatttttggtctaatttgattttactaattctaccaagactgttgtagatgataatgttatcgtcagattctaccactgaaggatcaactttatcttcactagtaccctcaggcccttcaaccccttcgacagtagtttcaaaattagaaccctcgtcggtatagataattaatgtatttctcttgatatttttgaaatgatccttcaactcagtcaggtctgagataatttcattgtacagattagtgtcgttgtttaggacattctcataaaactcaatttgcttcgtgtattctccagacttttccttcaaattatcgatatttagctgattcaactgcctcaacgttagacgcatcacactcttcatctggtcatcattcaacttaaactcttccttcaatactttatacactcctatagctcaatgtaaattagagtaaaaagtatttattacttattttaacattgtataacaatgaataagtgtaaataatgaacccttggtagttagtatagtatacctttctggtgattttggaaagagttgataatggtgttgatattgagataaatgatgatgtaagcattgataatatctaggttctttttcaatttgagtaacaagtgcttgtatttccttttgagaactttaagcctaaagtcgagccaaatcttcaggatagtatagaggttgaagcgtattggtttatcttggtcaagtgtgatgaagttgcacttgtaattatactctgtgagtctctgcagtttagccatgatctcctgaatctcaatcactgaagatatgttccgcttcaactccaccacgattcgagtcccgttacggtcactctcatctttcacatcattcacaccaattatattattattctttatattacggtttatgttctctattatgtcgttctaagacaatcgttactactgtttaacaaggtatataaattttgactagacgtaattaggtaaactatataggaagagtagtacgattcgtgtgttgtaggggatttggttaatgacaattgaaattctagaattatgtttaaactttatatccttgaaattattatacacatttatcacatctctaaaatattttatgacaaatagggataactgtgtaactaggggactggtgtctcagcgggactaaattcagtaaatggtacgaatttagtccaataatacctaaacttctcttcaaatacaaattttgactgtattaacactgtccctttaccgctctcatatattttcctcatagcttctcttgtcgtccttatgactcctccagttgggaaatcaggtcccataacctcattaacaatttcaacattcttatcatccttgagaccatcaacagtagtatcagaacgagtttcagcagtagtttcagtagtagtattgagatgtgacctatgaattgtgttgaagtatagaatttacttgatgaattgtatggttgcgttgatgacttcggtgggattgtgtggaggaatattagttgccagtccaacagcaataccagaagaaccattaattagtatattaggtaatctgcaaggcaacaccatcggctcaatctacatcacaattaatctgtcatatataatttactcagaatagttatctagttagatagataaatggtgtgtaaaattacattggtattgtcgaaatttggtatataatcaatagtattgaaatttatatcattcagcattatcatcttactaatacattattattcactataaccaatttttactgtgtagatgaaataactaagtagaaatatacgaaaaattggttaatctgcattcggtataacgcatagcggctggaggatcattatttgaaccaaaattcccgtgaccatcgattagtggcactttcatgatgaagtcctgagagagtctgcatagcgcgtcgtacacgctcttgtcactgtgagggtggtaattacccaagacatctccaaccactttagcacatttacgatactgaccattcggatccagtttcaacatctaaaattttttcaaagaagttatctactgtcctatagggggatctaactctatataatattataactatagttagcattatatagttaatggtataaagagttggtgatacgtgcatggcccatataatcctacgatgaacaactttaagaccatcccttgaatctggtaaagcacggcccaaaattatactcaaggcatattttaagaaactactgcacatataatcgttcaatttcaaatattccaggctctccttctcagagtcaccatccaacacttctactccagtagaggaatttgataaatctccatcatcggccactaaattcagtggattcacatcattttcagttaattttagagaagttactgaatgtacagtgtttccaaatggttccaagtgatctccatagtttccagaatttgataaaattttattaaaatcgtgaaatttgtaaaatttactaacaataaagctgtcaacgctgttatttaaagtatagtacaaaagagtaataaaacatggtaaaaggtgtgtcatttatgaaatgaaacaatttgccatttaaaggcacaaatataatacaaatcaagtcatttataatgtaaatttaatataattaataacaaaattgggaataaattattttacaggtttattaattgatttatattttttttagtactatagtgatttatcccataagattccattatctgattaattcgtttagtttcagtaattttacgcaaataacttatataatgttaaataaactaattttatagataattgtgcaaaaattgtgcaaatgtgtaaaaaattaataaatttaacaaaatatatacctgtggtgtgatattcgtgattcttatattttatccgaattctgttaaattattttttcttacatttttcaaatcattcatagtatttttaattaaaatttaataatccgtgtaaattagtttaattctctgtaaattatcataagttttcaagtttgacattgagtcaacttttccccgtttaaatctttttaataaatttaaataattttaatagttttactaagttttcatttttaacaccttaggctgttgataactgtaatatgattgatctggtggctaatatctctagtatcagtattgatatgacaagtattagcataattaaaataagtatgatgaatagtaagatgatatgaaaggattagaggagaaaataaacgataatgagtggtttttgtataatttggagcgtccggctacgctgagggatcgcataactttttactttcatacgcgttttaacagacggccttacaaatctattcgctgtatatcaaataaaggcggtacactacccaaacttttccgtatctttaaattataatataataatttttagtgtacaatggactggttaattcgaagtacaacttcttcacatttgttccactggttctatattcacagttcaggtactgatatacagatcttactatacgcttctgactacatagttttctgctatttaaatgaacttagtattgataatagttaagcatattatacccctatcgggtagcatataatgttgtagggtgtttataaacttgttttatttgtcgatgtgtttaacgcagttggtaccgattttacgtgtggagtctccgatagttcacttgttcccactgagtcttgtggttgccgtttgcatgttgaaggagggcattgaggactataagaggcatgtgcgtgacagggaacataacactcagaagttttcagtgtaccagaaggatgactatgttgacgtgagtgccgagaggttgaagttgggacagctgataactttaaaacagggtcagagggtcccagcagacctgctattgctcaagacgagtgatcccaacggtgcctcatttgtcagaactgaccagcttgatggggagactgactggaaactaaagcgagcagtagcgacaactcaagccatgagcacggtgaaggagattttaagcctctactcagtagcaacggttgaagaacccaaagatgatttctacaacttcaccggtaaaatctgtttctaccacactacaaactcagttgaccaaagtaatcaacttgatgatgaaaattccgtgaattcggaaacaaattctaaaccagaccccggtacaaagaataccgttgatagtacccctgaactaaataattcagataacaccaatgtggatactaaattggatactgtggtggatactaaggtggatactaaattggataccaagctggatactgtggtggataccaaggtggataaatcgaggagtaaatcatttagaaagaaaacgtcaatagatgtggagagtaagttggagagtaagagaatagtggaatcattaaatgtggataacatagtgtggatgaactcgatagtagccagtgggacaattcacgggttaacgatatacatagggaaagatgccagggcatgtctaaactcaaagcgtgctaagatgaagtacgggttgtttgagaaggagttgaaccgtttgttcattgtcctgatcttgatcatgttagtaatgtgtgtgatgatgctttgtcccaatggtttcatgtccatgtggtacgttacttttcttaagtacttgttgttgttttccacagttgtacccctatcacttagaattagcctggaaatcgcaaagtacgtgtacaacagagctattgtgttggataacaagataccgcaaacaatgcccagaactacaatgatccctgaggaactgggccgtatcaactatctactcactgacaaaaccggaacactcacgcaaaatgtgatctcactagagaaactgtacatcacaaggggttactacactaatgaagatgttaacattattaaagataaaatcacaaatatacccaatacatatgcaagtagcggtaactctgtgagttcttccagtggtaacacagtaaatagtgtgttgtgtgaaggttcggaacttgtaattataaataataataagttgaatgataatttggagaatcggttatacttgtcattgttatcactggcagtgtgtcataatgtaaggccgatttcagaatcagaaactgcctctgatccagttgatcaaccaaataatagtgaaaatttggttaatttacaaataaatccatcagatcaacttcataatatggatagtaacacgggatcagataacacaccgaagctcgatagtatcgctgatagcctagttgatagtataatggacagtgtgatggaggaagtgttggagagtgatatggattttcagggaagttcaccagatgagatagcgttggtaaagtttgcaaatctgtgtaacgtgaagctggtggagagagatgactataaaatgattttaatggtgaatgggattcctttgaacctgaggattctgttcatgatcccattcagcagtgagactaagcgaatggggatcatagtggaggacgagtgtgggcgaaaacatttctttctcaagggtgcagaggtggttgtgattccaatgctacttccccgtggtagtgtctggctctcagaggaatgtgacaacctagcacgcatgggactgagaactcttgtatttgcatacagagctatctcagactcagagtacgataactttgtccaaaagtataacgaggctaatttgagtctgtatgacagagtgaagaagatcaggaaggtcacaggaactctagaacacggaatgcttcttgtgggtctaaccggcgtacgtgataaactccaacgtaacgttgggagtactctagagagcctcaagaacgctggcattaaaatctggatgctcaccggtgacaaaatcgataccgccaagtgcgtcgcaatctcatgcggaatgatccaaaaaaataattcaatttttcaaatctcagtagacaaactcaaacaactcacacctgaatctggaggtaaccaacaaccacatttaactatagttaattttagttaatttagtgttaactatagttaattttagttaattttagttaattttagttaattttagttaattttagtttaattcagtgttaactatacttttttttagtcaattttagttaatttagtgttaaatatagttaatttgctacttaactatgacataataaatatgttaggagcgccgttggtggttgggagtggacctccgattccggagatgattgagttcataagcaattttaacactgacgagaatgatgatttcgatgcaatcgggctgtataacgtataccttaactcggtggtccaggtgataacatacgagctcaatacgttcatcatgggcccagttaacaagacgctgttgatactagactccttcgtgatcaacatcgcagtcaacaactgtttcctgggagacaatgcagagtataacacaactttcaagactctgaggagactgtttgtgaagtcgctgttgctggctaacaacgtcctgttctgccgttgtacaccgcagatgaaggcagacattgtaaagttgctcaagagtgagaacaagatcgtgtgtagtataggagatggagataacgatgttccgatgatttcagaagcaaatgtaggaattggaatagtgggtaaagaagggctccaagcctcactttcgtccgactactcactggtagaattctctcatattaagcgattgctactttggcacggacgaaacagttacaagcgtagcagcacaatgtcaaatttcctaattcaccgtggcgttatcattagtgtcatgcaggcgattttcagcacaatttactacttcatgccaatcgctttcttccagggctggctactagtgggattcacgagctactacaacatgatcccaatattctgcctggtgcttgacgaggagatctgtgaggaggatgtgatgttgttcccagaactctatgtggagctgaagaagggacgagaacttaacattaaaacatttctgatttggatttggataagcatattccaaggcgcaattctcatgataggagccataattctctttgaaaactcacttgtatcgctcatctcaattggctgtacatcactgtttctgctggaaatactcaatttggtgtctgaactgcatcactggcacaggttaaccatcatcggactcgtctgcacttgcatcgtgtacttttactcactgctggttttcaggaataactttgatatggagtttatcgccagaaagtctttcttctggaaagtgctcgcaatctcaatgctcggctggctcccaatctacgtcatcaagtacctcaccaaaatactcaaaccgccacaatacattaaactcattgttacctaatctcataaacattttatcctcactatgataccgtgtatatactcctagtactaggatatactactcctatatacatacactgtgaactcatactgctataaatatactatacgccatacatgtacataagtgtatagttaattgtcagtggtttaaaatgtgttattcgagtggtatttttgtattgttgatgttaatgtgttttactccgtttgaaattgcgctttttactcttttttctagcagaaaataacgttcaattatgaaagtttcaagatcctcaaggtatagggtgaagttgaagccgtatcttttaaatatctcacgccttgcgccgcgcattatgtcataatttaataatctcctagcctctttcaagtaattgtggtaaattatgagtaagaccagagaaattacgaaatattcaagatcctcttttaaaatgttctccaaagggtcaatcatgagtaaatgcttaatagtctttgaagtgttactcatttcgtcgtatttcttcttcatattcttcagttttatcgtgtaatgatctgaaaatattaattttgagtatgcgaatgtaaccatcttgtcagccaagtctctcttggaagattccaggagttctgacaagcaagcctcctcaggggtttccaaacataataaatctatctgattctccataaaaaattgaattaattgtttaaattgatagttaaatgctgtattgtgatttggaaaagatctaagaattgttgattagggttataattaatagatctaaatcgtgagaggcttaatatggtcatgctcattattaaaagcattaagtctctccacagctgctttatgtttaggtggtttatcggtatctttacatgcattttcgttcaatgataagtttaaaacagattatctaatgtgtaagttgaaattagttaaatttatcgattagaaactgttcaattgagactacattctcatgaactttgtactgggaaactccagcgtaattactcaccaccttcaaagttaaaatatatattacaggcaacccacctacaacactattataccataaccatgtaaataactatatacataaactagtgtaataacatactgtaggatttatttttaagtttatatggtttgtttgggagagtgtatccgatttcagttactgtatccatgtgtcccattaagttatttatcctattcagttcaaattcatacaaatttgtcttcacacctgaattgacagtattttgactcatttcgctgttatccttgttcaatagtgtggacagattaatactgttataaatattgtattggttggtattgagaattttttttaaggatttgaacgtttgccgtttctggtcatgattagtaaaagtaaagtgagtaaattctaataatttttcaagtgagaatccggaataattgggataatttctaaacaaactcgttattacataataaatttcattattactcattaatcctcttttcaacttgtgaatcaattcatccactccatcgtcactatcctcggcaatagcgttctcagaggaagtatttggaagcttgaatcctaataaattaagtgtggtattatgtgacttgaacagatgtttaagacttgagagtttaaattggagataataattacttgtgtatctgtacaaaattgatgacataaacgagttcatatccttctctctgtacttctccagtacgtattttaaaattctattatccgactcatttataacatcgtctttaacattttgtatattaactctttctacagctgatttagaagatgtattgtctacagttgatttggtggctgtattatgtgctgggggttgaatatgaaaaattggccacagtagacgacatacaatgagaaccagtgcacaggagagtatttcatcacttaaattaaactcagcttctaaaacacagccaactaacttatccaacactattaaacaaatacttggtaatcttaaatatttcattatttttctacacaatatatccactttactgtcgtttaatccactggagtcttctaacaagtaatctaatctgttagattgcgagtttgggttcttcttaaaattaatatacggtagcctgttatatataataagcttatataactcattaatacttatgggatatcgatacttatttaaacttttacatattatttcaactaccaaacgttcatccagagattttacattcactggttcatcaagaggttttccagaattatgtggtgaattgacattgacatcctgacaggaattgagattagtgataaaccttgttagaaaagatttccagagatttttagcgtaaacttcaactctatacgttacgttgtatttaattactaatattttagttatattctttaataattcttgtaactcacaaattctcacttttatcttagtgtctaaagtatcagcagtgtctgtggttaaaccaatttgtgaactgattggtatggtatcaacttgcagaggtgcaggttgtgagattttctgtgattttgaatagaaacctgagaaaacgtcaacttgagtttcagtaatgttctgaatcacaccacagattggacaagtcacagcatctccaatctcctcatcacaattctcacatatcatctttccgaatagttatcgtataatataatttttacccaatccttcacggaattacagaaaattaggttatatgaagttaagaatggagttaaaattaagttcataaagagtgaatttattattttcataaaaaactgagatgaataaagtgttcttgaaatcaagagaattctgtaactcgttcaaatatccaaattttctacaaatttcgccaatatcatccttggaatcagtatctaaagtagttagttggagtgtatttatgacatcgtcggtaataaccttgttactgcagtgtattggaaatattaacaagtttttacgtacatttttatcatttttgtatacacataatagactgttcaattttacagtgttatctgcatcacttagtgtcttcacttcatctaaaggatcttttacaggtgagttggtaagttcttcgattgtgaaatgggaggaagaggagttaaactggagtgaaattggagtaattttagaaaacaggtgtttataataggaattaaaatatttgttcaatttttcaaccagttctaaagaaataacataattatcctccagaatcataataaattaataaattataaattataaaagttataaaatttacacaacatgaataaatttgtagaatttgtaatattccgatagaaaataaaattgtggattaaaaattattcgacttctacatgaccaccagaatcctttattaacttggtcaacttctccaattcctcctcactcacatctaaaatacacatataattaatgtgcataattaggtatatataactaaatatgtatggtatctaaggtatagtagtgagaacatactttttttaataacttttgggtaagattctatcagttctttggattctcttagggaaatatttaatattgttcttattgtttttattacatcgatcttcttctccttgtcaaatccaactaattttattgtccttttcaccggcaccttttccttcacaggttcttccttagtactaacattagtattctttggagtactatcagtggaatcggtagtattggtgggagttggaggaggtgtaaaattcatgttaccagcaaatccattatctaaaaattttttgtctaaaattgtaatattctaaagatacactgaaaaaaagagtttgggtgtggaaacgggagtctattattaacattattggtggaaagtttatcttggcagaggttacacaaatctgccacctcaattagggttaagttaagtatctcatccactaattttatcacctagaaataataaaatcaatgtatttaaatacttttaaggaaggttttctagtttcttcatccactttagtttcagagttagaatcttgtaatttcttaaacacgtcaaatgtagtaaaattccttccattcaactgttttatacgcttaaatattaataatctattaatcaacatcatacaacaaatatattatacaaaattataacaagataataacatataataatgtgtgatatagggtagggaaattataaattgagtagtttcggatcgaaattaacttgtttgaagagttggaatatgaactcgtttgagacctgaagcggataaaaatgtgtaaaactaacattcaaatacaacttcaaattcccattcaacagtattaaatcactctcgtccttgttgccatttcccgtgctttcattttcatttattaaattattaaatattaatccgcttttccctagaaataattgtgttaattcggtgtgtacaaattacctttttccattcttatgttattattattatttattatataaatgtacccctcctcaatcaaccaaaacaactacaaacaaggtgaaatttactgtaatattgtgactaaccaactaaataaacggtgaataaaggataaataagccatgaataaaccataaataaactatgtcgtacgttgtagtagatgaattggtttgtgattttgattttaatgtcgagtaggatgagaatgagttgtagtattgccatgagatacttgaggttaaaagtgttactagtgctgttacttgacacactgttgacgctagtcacttgtttgtaccttttattatactgactcaccacgttaatgttatatatcgacgacacataacttgaaattaatattatcttacacaacaaattcaaatcatttttcccagttgaattttccgaatgtgtactaattcctgcgaatttctgttctaacttcgatttatccaatagattagaaggtatttgagcctcctcgggattaactttatttaaactattcttcaagtcttttggcgtatcctttgatatgttctttggtgtgtcctttgatatgttctttggagttggattgtcagaattgttagtgctggaacaggttgtagaacaagtggtagaagtgatgttactaccagtggatgtgttgtatgtataacccgatgtaatatgattgacaaatctggtcttgtaattgataataacattgtggatgaatttatcaattgagttgtagaggtcctggctactattcaactttattccaagcgtcttgctattcctcacattcgacgtattcggtatcgcattataaatattatacaatatactacacaataatataatttatatatctgagaaatatagtaaaaaataattaatataactagggaaatagagtaaaaaataatatatataactaggagagtaaaaaatacttggtatagagtagaagtgagtgtatgtcattgttgtagtagttgtatagtatgctgacaatgtacttgataaaacttagacttattcttttattatagtattgatgaatataattagtcaggaatgatttatttggcgacttgtaatataattttattattgggatgttatactggtaatttatcggtatctcatacttccctaccagcataacaattaacttgttggacgtgtttacagaggtgtttatcccatcgtagacgtattcgtgaagctttaaaatgttaattaggagtttattctggataatatcgttgaaattatcaaagatgtagacaacgttaaagttaacgttgtccagtagtaatttagtaaacttgaccaggtcactggataacaaagtcttaattatgtccttatcctccaccgacttcaccagcctactcttaaactcattccactcatacgttaataaaatgtcattattatcaactaaaacatttttccaactaatttaaccaatttaaataatttgtatagaatttaaataatttttatagaatttaaataatttaatggattaaattttgtacattggtagacggataaatcgaagtaggagtagatgaactttttcttatttgtgatgtaattgactagaatctcgttaatgtctacgttgatcaacttcacaatctgaatcaacggcacactgttctcctaaaatttttattaacgcaaataaaatgagtagataatcaaaaatataattaaaataaggtaaatatgagtagaatatagtaaatataagtggaaggctttggaataaggtggaatatgtaatacgcaactatagcataacatacagctcctagtaactggtcaagcttatcaaaaaagtcatcatcatcgtgacaatacaacattatgaaatgaaattagtaaaatagtaaaaaaattaaataaattatgaatagaaagagtacccaatagagagaaataatattatcagggttaaggaatcaattattaattgatgtgtagagtacttttaatttttcactgatgattttcaatagtttgatcttatcttgttcctggttctctgagttttcagagtacattgcgtcaaaatgaggtagaaacatgtctagattagataatttaatcttctcagtccagttaaagaacacattatacaaattcaagcctaagctttctggtctcacaatttcactaaaatgtgtacccaaatcacggtcctctcggatattatccaatctcctattctcatcactcaaactaattccactcacattactaatcccattactaatcgcattattattcacattattcacattactaatgccattgtaaatgttattgtacaaattgttggtggtaaagttattccctgtgtttagtatggttttaacaacttcaccggatgctccggcgcagatggtactaacgttgataagagtgactacagccactttaaggatcttaatgtctttccagaatctgaagagcaagttgatgaagttgttaacaattttaaggaaaataagtttatcagacgatttcccgaggatgaagttgtacaaatcctccaccaccaggccgacactttccacatcgttacataacattacaaagttcataattaacagcagttcgttgtagagtactacactttctcgagtgtagttgactatgtgcctgactctgtcacagagtacattcttcagtagtatgtccaagtcactggtctttggtcgttccgtattactcaccaacttgagataatcaaacgaattactattggccagtgagtataagaagatgagatagaagtaataatttagttggtcaatgccgttgatcacttttaagatttggttatgattcttgaacctgacgaggtatttaaaaaagtgaatgtaatatttgctgttcttcacctggttatttgtggttaaatagtaaattacctcatttaccatacggttgatctccttgaaacaggactcgccaaaccgctcaaattcgttataaaatatataaaacagcttcaaattctcatattttatcaagtttcgcacctctctcactattattagtgtgttcttcagtagtttatcagtgttatctggcccagagggttctgaagttcctgagtcattcacaggccccgtgttattggatccggaattacccgtagtcgccttgttagttcttagatttgataatttgttaacgtagttaacaatttggttaacaacgttgtttaagtactcatcgttaactttggttgagagattgtagaggaagatgatcatgtccgtatttaactcttgtgagtaataattatcaatcgcgtccttctccaacttattcacttgcaaaactgaacagctttcaaatactctgccatctgatccggtagtttctgtagtgtcagacaccttgagtatgttatacaacttgaaaaggtatttgaggtatattttatctttatatttattaattgagagtctcaagagtagcagtctccattcgttaatatttaacactagagaacactttaacattttaaccagtttgtacaggcaaaataaggtaaaagtatcctctgaagtttctgtacccttggtagttaacacgaaatataacaacaacattcttctcaatattttctccacatcactccattgtgaacttgacaaattctgtaaattattgcgtaaggtaatcatatttgtggtgtgtaaattgcccatgtgtatattaggtaaattggttagattgtgtggaaaggtgtcggaagatttggtggtaacaatgaagttgcccagttgtgtaattgatacagttgaattaaccttgtcaaaataattaatcacaaatatatacatcttttgtactaataattgggcaatttggatcataagtttcctcaattcctcagacagtaacgagttaatatctgaattcactgtcacttcaaagcttgtaatacaataatttatcaacttattcaatatcaaattgacatgttgcgttccaacttggtgtgacgacaggattgacaatatgctgtagagagtttcaagtttaggaactgtaatgccattttggtcattaatgaacttgacgagaatattattgcaaagttcttcaatgttggtgaaacttatgttttccgacgaaagttctgataagttattgtcaaccttgtcaaatgaaattattattttattattgatgatggtgtatttatacccaaagtaacagttgtataccaaatatttaagtagtttgtacactgaaatgtcacagtctccgtcactaaccacgattagatttaacaggtacatcattaaatccttgttaagtccttttaactctgttttacacagttccacatcaaataaatgtttattcacaaacaaagaattctgcgtgttactcaagtctccaaactggctcatcgatagtagtaatctcttgttataattataatcatacgacagtttgtataacagttgtaacgagttgaaagactgagaatagtttatggacagcactttgagtgatttgaacacgttgagaagatcacgagactgcattcccgacaccaacagagagttgaaacagtttttcacgtaaaatgataataacttttcatcccttgaaatgacctctaaaactaatttaaacaggtttaatgaaatttccacaggacagtttttcacaacttcatcaaacttatctgaagaatcccatgaatttagaagtttcctactcttagaagaggagttgtatactatcagctggttagtattataattatacaaggtgttacaccttagtgactgaactagggtgtcataattcctgttattgatcaggagcattatgaaatcgctcgccaattcattacaattattattaattattgtgaggaatgtgagtaggtttgagagatttgccttgtttaagatgaatctgtacatcctcgtaagtacttcagggtcaattttatcaaatttacaacttgaattgtttttggatttaccagtgcaaaacctggtgtaaaaatggtttaacagtgccaaatacatctcgacgttactagagtccaacttcatgttcacaagtatttcatgtaacattttcttgaatgcgaaggtaacttcgtgatgtgttaatttctgcccatcttggcccactgaagtgttacagattcttgaaattaatgactcaagcgtcaggaatcgaacgtaaaaaaatcttaaaatgggatttataaaatcaacattagtggaattttcataatacttgtggattatgtggagtaatagcagttcaggtgaattgagttcaaaggtggaaatggtaaacttgaactcaggtggaaaattcccaagccttctcaaaaaattcttgttcaaaattaacatattaacaagaaagtcgatgatatttgttaaagttgaaatatatattttttcagtagtagataataccaacgttgatatgatataagacaattctctatcatttttcaacagcagtagtacgctgttgtataaatccgtattaactcttttatctcctaaagtgctcaaatgttgagaggcgttaaactttagtcccatttgtattgagttaagttctgtattaatcaactcatttagcagtgaaattggataagtttgtagcataaaatagttaataatgtacagatttaaactggaatcttgtgagagtgtggttttaaaaaggtcatttctcagtagataaagaggtatgtaagctccagattctctagttctaagtaacccatagaacaatttttggtctatggtacttttaatggcatctgaaagttcctttttagtgtaactgctgatgtttagtttggggaaaaccttcagcaaaataacattaacaatgttggtattcacagatttaaagtatttagctactgcaccaaaagcttctgaaacagtactacgattgatattattagagcgacgggtactataataatcataattttggcgattattgtgttcatcactttcagttttatcaaacagcggaagtgagatattatagtctgatctagaaaatgagccaaataaacaataaaatgtcaaaagagtatcctggaacagtaataatgtatctctggcagtggaattttgagaatttgaactttgatcacttttaaatgtatctctgtatgattcaaagtgttctctggtgtaaacatttgcgacataatgtaagttaatgagattcaataagactggtaaacgaacttgtgaaccctgtaacgaattgtacatactaaaaagtttactcctgaaatcctcaaaattggtaataatgttatttataaccttgcaattgtgttccaaggtataattgaacaaaaagttgagacagtcaaaaaatgataaaatctcattcctgaccacaagtttaagctcacttatcagtttcggatcatcaaagatgagtaaactcttatccttttcatagctcaagggtaagttacggtcaaattcaacgtaattactcctgttaaacagggttaatttgtacacctttagtatattttccagcttctcaacttgaccaacggcgcctccaagcttatcactaatcaataattcgttgagtaatttattcttgattagaattgcaatttccgggtttgagtcatccaagttggaattagtcaattgagcagaatttgtggaaaaaaactgtaaaaaccgtgaaaatgcgttattaataataaaatcgtcgttcagaatctgatttaaaattttttcattaaatctattctcaagcaagatggtatggaggtgtttaaaactgtttttacacagaaataacaccaattcgcctggctccgacttcatattcatactatttaccaagttcatagtgttagcctggttcatagtattaacaggattcatggtattgttcggattttggttcgaattagcagagtttagtgtagcggttgaaacggatgtataagacgtcatcgataatagtttaaatacagtgtaaattggatgaaaccagacattatagtgtcaggattaacctcctgattgcgttgtcataggccttccgattatggtgtcatatggcttctgattttgtagtgatttccaagtgtttgttcctaatcatgtcaattatggtctcaaacttcaaatcttcgttataattaaacattttattctttacaggaaataatctaaaaaaatattaatttgaccgaaagttggggaacctacagttgagtgaatgagttaccgaaaattactcttaaattttccttcattgttaattttttgaattttattttttttaattcgtcaattttagaatttcccctcactattgcccaaatctggttaatcagaattatacacacaaataatagaaatagcaccgagatcaggaaattaacctaaaaaatattaatccaattattgttacaaagatgaaatatagagaattccgctcaaaaatgtaagaatccaagtgataatctttatctacgaggtccacaatgttaaccagaattatcagtagattaaaaatacacatcagctccaaatactaaaattaagctttaaaattattaaagttaccactagaaactggataaaatacttttggttacatagtccaacacaattcgttatccaaacacctgacaacagattacggagttaacaccaatgactaattatgactaattgagtggtacagtggtgatccattttaagaatgcattttttacatgttttgcagtggtgggagccaattggtcttgaggagttacacttttcacagaattcaaagtattcctcaaattctccaatttcttccactgattaaattattgaaaatgatattttattacctgtgattagtggaatgaagcctggatttgaggtgatacagacgtgataagtccacgttatcacagccaccaaagggaaatataacacaagaaatattatgtaccattgctctttaaagtttattctgaaaccatgttaaattctatgaaaatacattttagaaaagagtattaaaaatgaaccaaaaagagaataatatatcaatatataaacctaaaaaataaattagagtgaaaaattctttacaaaaatagcgaaaccaattctaaaaaattattatatctgttgactaacttagatttgctccatttcatctaattctcatcctagaatttacattttaaactcggccaacttgacccaatatgtgtaaacttattagccattatttacattatttatctacacaatttgttttatttatgtataatattactagagtaaaaaatgagctcctcggaaattaatgtaagcctaaaataatttaatttaatcttaaattttctttagtttgaagaagcttttagtatactttctaaaaatgacgaatatttaactcttgaggatgcacatgaacttatatcactttttgttcccgttacgtgagttattcataagtaattctgtagtttagaggaaattgaaggtacacattttactagggaagatgttaaaaacttaattaacaagtttaagaacgaacagtccaacaaaaacgaacaactctcagctctcctaaaggtaatctcactcatttgtacaacttaattgtattgttaattgtattaattgtgtgatagaatatgaatgagacgattgatcgtaatgcgttgtatcaaatatttaagactgggaacaggataagttttaaggaatttgaagagtttttaacgcatttgaacctgaaccaaacgaaaatcaacacacaagaactctaccataatctactacaacaatatttactatagtattatctactaaataggttgattttgcaggtgtaaggataatgcttagatgggaatatggtatataggatttggtgtatagagtattacttatgaattattcaatgggaaggccagtactgatgactttgattacactgtggatcataacaggaatattaagatttataccgccaagggtaatgtaatgtttaacaaggtcgtcaagggtgatacagatatttgggaaaccaatgatcctacaaagtatgcctccaaggtttttactgatacaaaaggagaaaacgtgagcatatatcagatggacggtgatattatacactatgggaagtcaggagctggatgggtgaagacttctcacaaagttactcttgatatcagtaagacctccagtaccatagagtttgattttcaccatgatggtgagaggaggactttcacgccaaaacctggttactttttcagtagagtcatcatcagtgatattcttcaatgtgaattttgggaacccaaggatcccagcgtgagtattaataaggttgtaatcttcggtgtagagtcgactatcagaaatgttagcatatttctcagtaataatacggttgaacatttccacaaggaatacgacgagtgggtcgcagaaactgccatgattcttaatatagatatcaatcatgataatgacctctttgactacagatccaccagaggatttggtcacttcaatcccaaggccaatttgactgtcgaaaaaatagtgaagaaaacgcttgaaatatggaaagctgatccagaagatcatggtctcaaagtagttttgatgggtgctggcaaggaagagaaacatatatcaattctgttggagagtggcgaattcgtacttcttcaaaagactggaaagggtcaaccctggggaaacattaccaagaataaacataacttctcaggggtaaaaatgtttgccttggaggagggtaaatccaactatcatgagcttacgagggaagattacgatccgattgtgtttgaatgtagatatggttacgagtttaggaatgatgtcaggtgtgtgagaatcatcaacactttcctgagctctctctttaaatctcaactaataactaccaaatactatcaatagagtataataatctgataaaacattgtaaaattgttatgtcttgagaagttgcggagtaaagttaaaaaccttcggaattcttataaacacttccctaaccaaatgaaaatataaatatgtgttaccaggtggataatttcttatttgctgatagtagtgacactgtgaactctgggtaaaatattaaatgatttggtaccctctgaaacataaattacatgtgtaaaacttacattgtctagcttaattctccattgtatatttgtattattaacattaacctgaaaaataataataataataattttatacgatgataaattgtgaagctaagagatcaactttgaagtcttcggcgttggtgaatgaaggaacatcagacaacgtaaggcgatataaaatggaagtattctcctcgtccttgatcaagttactagacaaatattcgtcctctatatcaaacacttttcgacactcaattaatattattatcacatttaaaattattaatttcatctcacattaacatattttaacattttaaagttttcagaatttttaaaaatttttaaaatttcaaccgttaacttgccataaaataactaagatagttaaggtgttaacgggggaatgtgtggaaattaggtgatgaaatggagaaatgtaatttgatatagtgatttctacaccccatatgatcctagattccatttattcatatttctcatttttaccctttttccatctttctccaatattaattattatttattaataatttatccaactctttattgttatcttaaggttgttagtggttaagtttttgagttctccagtattaagaattttttaaagattctagacaatggcaggtattttttaccttcaaaatcaataataatatcaataattatttatttatattattattattttatttcccaattattttatcaaattcccacataatctaacaaaattataataaatataatgaataaaatattttgataaaataaaaaataatttgtttgtagagaggggtggatttggaagtggatttggtcgtggcaggggtcgtcgttcgaatcgtaataagccaccggaggacgattttaagtcctgggttccagtgactaagttgggccgtttagtccacgcaggtttaatcacttcaatggagcagatttacctccacagtatcccagtgaaggagtttcaaattgtagactacttcttccagccggaaagaagtgagcataagctcgtagacgacgtggtgaaaattgtaccagtacagaagcaaactaatgctggacagaggactcgttttaaagcgtttgtagctgttggagactgtaacggtcacgtaggtctgggaagtaaatgcgctaaagaagttgctacagctattagaggcgctatcatctctgctaaactatcactagtccccgtcaggatgggatattggggaaatatgattggagatccgcatacggtgccgatgaaagtgtctggaaagtgtggttcagtaagggttagactggtcccagcaccaagaggtacacaaatcgtaggcgcacctacaactaagaaattgctacagtttgccgggatcaaggactgttttagcactagcaaaggctcaacaaagaccagaggtaattttctcaaagctgttttcgcagccttaaagagcacctacggatatctcacacctgatctctgggccaaagttaaactacaaccttccatttacgaagagttctcctccttcctcttaaccaaataatatattatattattaatattaatatttatatatataatatctatggtattgatacaattgaggtggaggaaaaaaatgtggaaaaaataaaactttctaaaatttggtaaaattaatttaaaaaatatttaaaatatgtaaataattggaagatcttggaataataaagttttgatggaaatttggtgattgtgtcaggtcccgggttgagtgctgagtgtaggtgggtgtggtatagcattaagatttaaacttacctggctggtgctcggggtggctcaagaatcaccctgtcatgattcggagcaggtcactgcactcagacgactgtaatgaatcatgggctttccttgtaaagtgccaacagcacaatttttttataaggcgtttaggcgccaaccttcaattcctcaatttttctatatatccatctattcaattatatacttaatactatatactatactatatatattatttactagactaaatattatatactatatttagttagtgttagtagtatcctgtggaatcttgagttgtctagtggaatggaataaaattttttataaaatatattttatataaagtaataattttataaattcatattgcgtaaatatttatggaatttagtgtattaatgtgttgagatgttgagaaagtaaaatatacaactctgtgataagtaatggaagaaaatagaataaaattaatataataataaataattagttaattgtgtgagattgagggtataattggaagtattatggtgtatttgatgtgtatcccgattattggttaaataatattttttgtaataatacaataaattattcaatttataatattttaatattataatatggtcagtttcagcttcagaaactccaaaaacaaaaacgcagctacacaactggtatcctctcaaccacattagcctattactccttattccaccaattactactgataattcagtagttaaatagtatagtaagtgttaacagtgttgtagacaccgaatgagctgattggatttgtatatgcgttggaaagtgatcagaagatcatgctgaaggagataaaacagagatttctggaagaaactgccgaaaacaccgaacttttcgatgatctcttcttcgtcaagtactaattactttattccactcgtttataatattattattattttgtgcaacagatttttgagggctagacaatttgatttaaataaaacagttttaatgttaaataaatacttcacctggagaaaacaaattaacctaacacatgttctcaaggtataaaatattctactgtaatttacgtagttaactgtacataacactgtgtataataaatttgtgtgaataatttgtggatagatgaacttgactaatataagggacacgttgaagatgtattatccgcatgcgttttatggaattgataagcttgggagaccaattaacattgaacgcatgggacaatctgacatcaccaaactcatcaacgcaatcaatcatgaacatctaaccttttattacatacaacgttttgaatactgtaacatcattacctagttacctattcccacggtcacacagttactcctaactatactatactgtacttaattatataagttaactatactaaggtatgaatatgatgaaatagtgatacatgtggtattaccatcgtgttcgttatttagtggtaagaatgtggagcagatattgacgttggtggatttgaagggttttcagatgcatcagatcaattcaaagttccgctgtttcttatcagcaatgtcaagtttaacccaaaactattacccggaaacactgggaaaattaatatttgttaacgcttcacccgtttttacagccatttgggccataatttcaaccctggtggataaaaagacactgtctaaaattagcgtagtctcagctaaaactgatttaaaatccaaaatactcgaaatcgtagatgaagatcaattaccacagttcctaggtaatatttacatagtttactatttacatagtgagaattacacttaattattgtgttatacgtagttattgtattagtaagtggatttgttgtaggtggtacacgtagtgatgagaattggtgtacgacgccgtttggtccatggaatgatgagtcgatattacataaattaaagcaaagaacttatatacaagaagatttatacaatttagaatatctctaattttatcacacacaatacatacaacttaattttaagtgattaatttttataattagtatcgtaggtcaatgtattattgtaactcaaggaactcagccatctcaagcaacaccaagtcaacccaatagtcagccagcaaaaaatgcatcgcaacaacaatcaagtgcatctgcaactaatgtaacgagttctgttataggtcaagccagcggaactcctgtatcaagtggttctaccaaacaagttagtcttgacactgataagaaggaaagtaataatgaaattgattacaaaaaggatggaaattttcatatatatacgccgaagtctggtcattcctttactaaggttacccagggagcaaccgttatctgggagtgcaaagatggcatacctggaacattggttagaaaaaataaggatgaattcgttgccatactacttggtaatcgtgattttgtactatttaacaaggataagaataccaatacctggaaagacatcactagtcagagacataacgtttccgaactgaaattcctaactgataatgataaagagattgctagttctgactatactcgatccattgtccatgagtattcttatgaatttaaattcaacactggagttaaatgcctcagtatcaagtatgacaacaatgtaatttggaaacatacggatgataacaagtataaggacataacgaagtttcaacttggtcttgtttctaacaattttttcgtcttcaaaaatgaaaatacatttaagaatataaattacaaaggagaaatcattccccgtaaggctcaagcaactgcaactactcaaccaaaggaagctcctacaacagctccagctggatcgactgcaactcaagctcaacctgcgcctactcctaaggctcctgaaacgtctgctactacacctcctcaggctcaagctgagggtacttctgtgtcaactccttctggcacaccagtcaccgttgacatcgataagactcagtccacaacagaatttaactacactaaggacggtgattatcatgaatacactgctaagtctgggctctggttcaacaaggttgtacggggaacgactgacatatgggagtccaaagataatgtgcctggtaccaaggttagaaagaagaaggatgaactcttagtcgtattgttgcggaaccgcgattttgtactattccaaagctctgataagggcaaaacctgggctgacataaccaaggaaagacataatgttactgcactgaaattctatggtgataatgacactgagttgaagtccactgactatttagttaccgtgtttgacttcagatacagagtcacatttaaagatggagtcaactgcaagaaaattaagtacggagatgatgagatttggaagagtagcgaagatcccaaggcatgtaagcactttgaactaggtcttgtttcaaacaaattattcgtctgcaagaatgaaagctcacaaaagaatctaaatttcaaaggggcaatcatcactcgtaaggctcaaccaacggcggctcctacaatggctcagactacaatacctgtaacaactggtcctcaagtaagtggaccagcagttactccctcagctacaacacctgtatcggctgctactgctgtagcaactcctaaggtagctccttctggtcgacccgttacacttaacatcagtgggaaggtcagtactgatgactacgattacactgtggatcataatagaaatgttaagattttcactgccaagggtagttcaatgtttaacaaggtcttcaaggatgaaacacctatttggacgactaatgacagtactaattatgtcactaaggttttcactgatggtataggcacttgttccagtaccaaaaatgtgaccatatatctgtttaacggtcagatagaacattattgtaagtcagaaggtggatggcagaaagcttctaataaaatatcccttgacctaggtaagacctctagtacaattgggtttgactttcaccatgatggtgaaaggaggacttttactgcaaagcctggatacctattcaaaaatgtcttcctcagtggatgtattgctggtaatactttttgggatgcaaaaactgacagtgaatgttcaagcaaggtggtggtctatggtgtagagtcaagtattaggaacgttaacgtattcctggaaaatgataaagttatacacgcccatagggtaggaagtgattggatctcaaaaactggctttgttcttgatatcaacaccaataagaataatgaccttttcgactatagatcgacgagaggattcggccacttcaatcccaaggcaaatttgtcgatcactaggattgtgaagaaagagcttaggatctggtctgcgaaagataatgactatggtctgaaggtagtactcatgggctctggcaaggatgtgaaacatctgtcaattctgttgcagagcggaaagtttgtgctccttagcaagagcggtcagaataagccttggcaagacgtcactcaaaataaacataatttctccggggtaaggctgttctccctggaagaaggaacatcaaagtaccatcaactgactaaggaagattatgagccaattgtgtttgaatgtagatatggttatgagttcaaaaatgatgtcaggtgtgtgatgatcaccaatatggatatggtactgtggagccacaccgaagacacggagtttggttatcctaagggattctatctcgatcttcgtcaaaacaagttcagtgtcacaagtcttaaagatcagacaaaggaagtaactcccacaaaaataagtgccgcaatttctgttgctactcctgtagttaaagttccagttgctgaaccagtgaaagctcctgtagctaaagaagcaatagtgacccctaaagcaactcttgtagcaggtccaccaattgttaagttatattccagtaaaccaggggaactcacatgtaaagttgagaaagagtttgacgattttgattacttcctagaagatcttaaatgcgaagtcattacacatgacggaaactgtgtttggaaacatgaaactggtaaaccctacccaaggtatatgagctacaacgaggaggactgtaaaatagttgtaagtttcgagaaggagtactatacgtgtaccatccaagatagtaagtggaaatcagtgatacgtagttatgatgcgtttgggactggtggtattggcccatcatacgcatttggtgatacctctgccttaactaaatcgtattccattattgcaactggagacactattaaaccaactgaggctaagacagtcgccgctccagcagttacagcccctgccaagccctctgaggccacatccgtggctctggatattgagaagaagcagaccaccaccgagtatgactataaggatgataatggagttgtcacatacactcccaaggcaggtcatctgttcaataaggtttcagaaggccagcatgaaatttggaaatcagttgctaatgtgtttgggacgttggttaggactaaggaatccaagggtattaattaccttgtagtcctattgaccaataggacattcacgttgttccaagaggctgatgaagattggactgacataacttccaagaggcacgatgttgcgaagctgaagttcctgggcgaaggagacgccgtgctgaaggagacagactacgatgtaactattgtagacatgtcatttagtcacacattcaaaagtggagtcaattgtaagaaggttaaattgggtcaagaggttgtctggaaatcaggtgacgatccaaagtttcaacagataacagtattttcgctaggtcttgcttcaaactgtttcttcattaagaacccgtctggtgaagtcaagaagatagaatatgaggctaagactaaagaagaggttaaggagacagttaaagttggagagcccactaaacccacggaggctaaaccagtagctgaacctgcaaagcctgtagctgaaccaactaaggaggtaactgagacgatcaaacctgctacagctcaagtaacaactgctgtaacaactcaacctacaacaactcctgttgttaaagagactcctaagccagcaggacctcccaaacctgccgctccagctgcgcctgaagaacctttgtcagctcgtactgataagtccatcgacctcgacattgataagactgagggtactgataagattgagtactcaaagagccagagtggtaatattcataatttcactcctaagggtgatcatttgttcattaagattacagagaaaaatgatgttgtttgggagtcaagaagtaatttgtttggtaccaaggttatatttattagtgagggtaacaagaattacgtaggtatcatacttgataacggtggatttgtactacttaacaagttcgctgggaagtgggacgatatcactaataccaagtatgatgtaatgaagctgaaattctatgatgacaaaaacaaggaactcacgtcctcgagttacacggttgctctagttgactactcttacaggttcacgttcaatgatgaaaaaacctgtaagaaagttaagtatggagaggatgatgtttggaaaagtacggatcctaacacctataaagaaattaagatgttcgatcttgcttttgtttctaactctttcttcatcggtgaggataaaaataaatttaagaaactagattttaaaccaactactacatctgttactcaaccaaaggtaacacccgtaacaactgcagcagttacaactccagcaactactacaccttctgctcaacctaagacaactccagcaacaactacaactactgctactcctggaactccagcaaccacaactggtactacagctgccacacctacaacacctgtaacatctactacacctgctgctcaaccaaaggcaactcccacaactacaactactcctgctacgcaaacacctgtaacagctgttactccagccgagacaactacaacacctacaacacctgctgctaaaactgcgacacctacaacacctgtaacaactgccaccactaaccagcttacccttgatattgccaagaatcagagtaccaatgagattgactattctaagagtgatgataataagtatcataagtacgctccgaagtcaggtaaagtgttcagtaaagttacccagggtaccgttcaaatttggagctccacagggaatgtgaatggtaccttggtaagagtcaggactgagaataatgagaaacatgtagccataatgcttagtaacaatggattcaaactgttccacagctctgataagggaaataaatgggaggacataaccagtaagagacatgacattactaaagttaaattctatgacgacaaaaataaggaacttaagacaccagattacacagttagcctagtcgatttcgcttataggttcacacttaagagcggtgtcaagtgtaagaatattaaacataacaacaaagatgtctggaaatctagtgatgataacaattttaagaatatcactctgattgaattaggccttgtttccaatgatttcttcgtccacaaagatgaaaatacaaagaagaaactgaattttaaatagtgcctttagttgcagaacctgtagtaccaccagtaactaaggtagtagaaccagtaaccaaggtagtagaacaacctgttaccaaagctctagagccacctgtaaccaaagccgcagctccagtgtctgaacctgttgtgtctggtcaggttgccagtgtgttccataggcatctgaggttgtgtaccagtgatcctgttgatcctagtaagtctgttcctatggactgtgaggttcttgagtatccaatcctgatttttatcttctaaacgaacaaaaaagccgatacactggctagtgataatacacttaatgatcttaatactaaaacacaaggacttagggatgcagtcaaaggtactggtggtactagtttatatgagaaagtagaagcactagctaatagtcctgatgatactaattctggtcatgtaatagataaatttgaaggagtaagaaccaagtacaatcaactaacaactgatgggagttacgaaacaaattaagttaatgagaaggtcaaggctgttgtaagtgcctatgaagatcttgagaaagtctacgatacaatcctcaacgtcaagaaggccaaaaatcgacagggtcaagttggtaatggtactgatgctactaagatttggtccaaggccaaggacctacatgggaaagccgacgcactatccaaagccactggagtatctactaatccttctcttagagaacctgctgaatcccttgctaatgctctaggagtcagtgattcaagtctccaaaaccctctcaaaacactcaaaactgctgctattgcctaaaaacaactctaaaccctaacccataccataactagcataaatatcataaaaagtataaaaaatactataccaaattattgtgtaagagttcttgttctttgttatattcttgtagtaacaattcttcatctcgttcatcattgaacccgtagtagtctggccttatcatacggtataactcagctcttgatacatcttttaagctctgttcaacttctttctgctgctgttcaaacagttccctcactcctggcaaattctttgctgcgccaaagtatttataaccactcccaccaattttcaattcagctccgtaactcgactctaaattagccgaaagtctacggtagtctgtaccgcccagttctatgatcctgtcatcccagtgcttccggatcccaatcagacgattaatctcgtcattcaaatcacggaccacaaactcgcccagtgaaccgtcttggatcttgttaatgttgaacattatttcctttattgtggcactacgccatttttcagcctcttttaagttggtgacctcagccgtgtgacggggccggagtacctgctcctgctccaaaccgctctttatacggagccacttattcaacatcgcattcgccttctcactgttccgggccatttttcacggagtttacagatttctaaagggttttaggagtggagttaggagtttacagttttttatgtatttccgatgtattttggatgttaattttgggatttgggggataaaatggtaaaatttgtgaaaagttgaaaattttgaaatttgttaaaaatttttaaaaattatttattgcgataaaaattaaaattttaaaattcaaaaatatttaaaatatttaaaattattaaaatgataaaatttgtgaaataataaaataatttaaaattttgtgtgattctattgggaaggagtagataaaatgtttttgaataatttatttaagttgagtgatgaggacacgcacggcgagggcagtttctgccccttaaacgaggacaataacatgccaaacctgccaaatgagcctttaaacggagttaacttggatacaaaacgcgaaaaatcatcaattccaagagccggtcatgatcaaagtaatcttctacaaagttacaaattttctccaaaattatctttttctcagtctaaattatctttttttagttaattttacaattattaagtagttaacattgtaaattacttgttattttgcgttagactgggtgtatccttctgcgatgcagttttataatgcgttgttgatgaagaataaggacgacgggaatagtaattacatgtcagaggccgttaaagcgcacaacgaagtcaacgaactctcctggaaccaaatactcaaatacgaaaaattacatcaatcgtaacaatctacaccctttttccacattttttcactttttattcatttgtttaattattttgtaaataaatttaatttttgtttagtgagtgtaagagtccgaaattgaggcggtttgttggtaaatataataatccaagtcctaaatcttaccttgtcagattattcaccaggtaactaccccgtcacgggtaataaatttacgcataacgagttgacatttttctacttattgaggttaattgttgtgtagatatgagaaaccgtttgataggcatgattggtacgtggacaggtgtggtagggaggtgaggtatgtgctggactactacgatgaccctaagtcggcaaattatttacaagtttacatcgacgtcagacccgcacttgacaacttccaaaacctctacgatcgcattaaattctcaatcctctcaattctcaaacttatttaactttttaatctaaattttattattctaatttaatgataattatacttaattttatactaattaaggcgtaaaaattactaatttaaccctaaattggaggtaattgagcgaaatttagggccctggagaggtgtccaaatccgtaaattacaactccaaaaccctaaaataacatttaaatatacaaaattaacatcaaattaatgtaaaataattaataaattatgtataaattaatatttaaaattattgtctgaatatctgagggtatggtatgagtattagctagctgagattatgtgtctggagatgagtgagcgtgtgtagattaatagtattaataatgagtgaaatattgagtagattagagtttcctcgttatttatcgttttttaacgaggggaagttggttttagtgaggaagcggagcccatttgagccctgggagaacatatctaacacaagacatgacataactaaaattctcttttttgacccggaattaaccgaatttaagccgtcagagtataaattaaacccgctggatctcacaattgaagtttctattgaggatttctgtgagaaaatcgagtacctcaacgtgaacgtgtttgaatacaaatctttcatggaatttggttaccccgagactctcctctttaacatcctgaggaataattttacgcttcattttctaaatgaaaagaaaattaaacttaacttcccgaaacttaaggtcccaactgatcccgacgatgtaacgcccgaagatcttaaccgcagcacaataacaagaagccttaaaaaacgtcttaactcttgtaaaaaaggtgacaggtgcccgaaaaaagtaaaactaagctgtaaatttgggcgaagtataagcggtagtgaccagattgaaccactgaggccttgtaaagacatcgagttaaacacgagaaaatataaacttaacagtttaaatcaaggttactggtaccaatttagtgaaaacagttgtaaatacgtgaaggttttgggttatttcctgtggaaatgtaagtttaatgacccgagtcaacagtacccgaaatcactttactattataaaattctcaatatattaatcttacagtttgaatcttggttcatactgtacaaattcatagaacagaagtggacacagcagcaagttaatatacctccaattaacctttatgaacagacagatgctggatatgtgaaaagaatgacaccagacaagtttaatgtggtcttgagtatctctggagatgtgtcaattctctacagagttaaccctgaaatcttctgtgtcatggtaaaatataacgttagaactgtgtggaaatcactaaatgacagggaatccgctaaaataatattatataatttaagtagtggagatattactttggattcggacaaaattctgcttctcagaaatgatgacaaaagctggaccaaggtgactaaattaccaaattttatcaagttatactctgaggacgagcttggaaatgtgatcccgatgcacttggaaaagtggaatccatacgtaaattccgcgaataaatgcattttcacactggaacctgatgccaaatgtgctatggtgacgcaatacgacagtgttaagaattgtgatgtggaaatttggtcccgcgggttactgcagagttacccgaaaaaaatcatcttcagcagcaaaaacaaggtttgtgttcttgaattcgacaattactttattgtctcaactctgaaagacgatgaatgggccagaaaagagttcttaatccccccaatccagctgcataaacaagatgaaaaaggtcaaacagtgctaatgtccagagaagattatgtgtgggagctaattaacacgcgttttatgatacttttgctgagtataaatgagggcgtcagatgtactgaggtatcatttaagaaaacgctcttgtggaattcccgtgataaatcgccgtatttcataatttacagcgacgccaagagtaaattatatctcacatttgatacggagattgttacgtacaaatataaatcaagggtctgggtatacaaacgttataagatcccgccaatcaggttatttacccaggataacaggggaaataagatactaatgaattaccctgagtatagagtccaattaagagatgagaaggaaggtttgggatattactacgtaataacccagggcgagtgtgatgaagtgagatatgagaataatttaatttggagaaaaactgacgagaaacatttgtcagggtttaccttttctaacgggctagtagtgttcaatttcgggattaaaaccgttaaatacaaactaaccaacaggagatggaacaaactaatatattaacactataatattatgtatattaatagtatattgtagtatagtaatagtatatagttaagtagctccctcttggggtatatatttaagggtatatagtactaagtatgtacttaaagtatggtaaaatgttataagtacattagtataaaatattatcaagtgttaaatctcctcatatcttctctttctaacctcttccgtatactcaacagtatcctctgtagtattggtatccacagtatctgtagtattggtatcaacattatcttcagtagtattaccatccatagtatctgtagtattggtatcaacattatcttcagtagtattactatcagtatcactgttgataacgtaattgagattattgccttcgaaatcgatgaggttgtcgttatcccacttgattgggaaccttgtaactctgggttggtctatgatacaacgtacgatcttgtccaggattggtaggtctggcgggttctccaccagactctcctcgtcgtacacattgttagtgtagtaaccaatacgaataaattcctggtcacagtaattcccacttatcaatatcgcctgcattcccaacacactctcaggccgcaactaaaaatatattagttatttcgtcaaaattagaaaactaattaataatttagggtttaaaaaaataaaatgcaaaagtcgatcgggctagcaaatggagagaaattaatctccaatattgctgcagtaactacttatttggtaaaaaataatagtaaattgtaaaataaatgtcaataggttcaaaatgtgtaaataatggggatatatagccagagtataactagagtgggttactctcgagaaattgggaggattgactctgaattcgaattcgagaatacctttataaagcggtcctagacaaaccgcatccaatattatctcacccttgttattactgaccaaatattctttctcctgttccatcatattatccacagaattatcagtgtttccctcactattagaggtagaattgacgtatccggagccatcggacgtgatgtagatgactttccattcgacgtcgtgtttgagatcttctaggcattcaaactcgatttgaaatatcaacggcaactttatactacaaacattattcccaatctttatattcgtcacatttatcaaactcatctccacaaaatctcattctttcaatcaattattcaattcattctttcaatcaatttattattttattttatttcaattcatttaattctaattaatttaattatatttaatttgattaaatttatggaataatttgtggaatgtgtagttggaatcaaaatggggaatcaaagtcaaattactcaaccaattccacaaaaattaaataataaattctataaaaataatgtaaaaaaatatgttttttattatatgtgttgaaaaacagataatcgtcttgtagtgtgtgatgttgaaaattgataatttctgtaattttacacaaaataatgtctataattactacaataattacattaaactacacaattccacactattctcaaacttacagagtggtacagttaccgccaataataccactcacactgccacaaatgacaatttaataagaaataaactcgtaaaaagaataaaaaaagatgaaaaagatgaaaaggtggtgggagaattggatttgtgtaagttaaaattgttattgttaaagtataataacgtgactgatgacactgtggagggaataataagtaaattactgtggaataataaaatattaagtgaaaaaatgtataaagtaatttattacaataatttatacaacaaattgaataaactttacaataaactttcaattgatgaggataagtttattgtaaatgtaagctacgagtttacattttacaagttcttttatcagttttacctacacttttacatacaatcggctataacaattatcccaatactaccattcaatactgttactagttgtattacccaggaaaataaatctgtaaattctgctggaactgctgctaaggagaaaattggagaggaaaaaagtgtaaaaaatgttgctaagaagagtggtaagttgaagaataagactggcttgactaagtttgacgagtttgtattgggatattactttggaattgagcgattcaaaagtataaattacgagttaacagatgctacggataagtttaaatatttattatatgataaaactttcataatggcaaatattcagaaatttgcatatcccaggggtaaactcaaggttaatttgttataccgtgacatactcacggttcaagattatctcacatacttaacactgtcacaacaattaccctgtgataacacacacaacggattagactgtgacgtagtaagcttaatgaatttgtgcctagaattaaatgttaatcctcaattcctatacaatattaattcgttcaactctttacttaattttctaaacactaggatcagtagtggtactgttaacaagagtgtggaaaataatactatcaattctgctgctaatactataaataatatgaatagtatgatgactgaaaagtattataagattgagggtacgggattggtagaggtgattgatgtggacaggttattattccagctactcatctcactgcaccacaatcacaacacaaacctcaatttcattctctttctactacactcttatactcagaatactgttaacactgttaagtgtgtaaacactgtagagagtttggagaatgtggatagcgtaaagagtgtggagaatgtgtgtaatgaagaaccatcaacagaagcaccagaattgtgtatgtatgagagtaatgtgataatatatgtaaagatatttaaattaatatataatccaaagtatggttacttttttcaatattatctgcgtaaaatgatgaaaattataaactctcaggtgtacgataggagtactcaaaattacctcaaaaacaccgtaaccaaactgttaaacaagtttaattctgaaattattgatcataacatttattataataagaaatatttccttctacagactctacaatcactcagcagcaacgtgactgaggaaaatgttgttgaagttgtttctgtacctgaagtgtataaatattgttacaatgtgttgatatattacatgaataatttgtcatataaaattgatgacattattatcctcaccattaatattatcattcacatttacactcataatttactcaactgcagcaatctaaatgtggaaaatattactaattctgctgcttctgttgctgcagtaactgctgctgtagaggaaaataattctgtaaaaaatgttgcagtagttgctgctgctaatactgaaaaaaatgttagagagatgtgtttggaggtgatggagagatatttgatgaataatatgcatataaagataacattgtatacaatgtacaagttgatgagggagtttgatatcaaaattgacagcatagacatgacagaaataaaatacaccaggaataaaaaaatcgaaaaatcaatctacaacaacatatttaacaggtcaaatattgattttcgatactttgttttatatttaattcagaatattagtcccacatgccctaggaggaagttgtaccaattactcgatttagcactcatttacataccctcactattaaaatacatcatcatacatattcttaatgattttattctcagtaacacatgtaactctcctaatcattatcaaaatctttttgatcccgtagaaaatctttttgctcctgatgttcctgctcctattgctgctgaggaaaatgatgttgcttcagggatatataatttggtagaaaagttgaatggcatattattgtataatatagagaatgaggataaggattacttatcactagaaattctctattaccttttagactacatcaactccaccaccacacacacagttaccccatactctacacactctacacattctacacattctatacattctatacacacagttgacaaagtaaacacagtaaacaagaatgtaaactcggaaagaagtgtgaataaagagttgatgagaatttacagtgtgataatgagtagtatgaacgtggagcgtttgtttaagtgttcttactatataaaatcctatacaaggactattcacataattaacagcatcacctctgttaaccttgttaattatacgttatatgatgattatctcgtggatattacacataaatacccaatcagcatttgtaaacccgtgacatcacaggattacctacacattctcgcacaatgttatttacatctagggaatcatattctttacaattatttgaacacagttgatagtaagttgggcgatttaacactgtggcaactacacactatggatactactgttaatactaccgaggcaaatgctgcttctactaattcttctgctatagttggtaatacaatgagtatgtcggagagtataaaattattatatgtatcgatacgtgagaataatatgaataattacgttaaatacatacaaaacttatccacactcaatcttacccaatatttacacagtttgtatactcgtaataagattgatacagatgacatactgtgtagtctggtgactaggagtaagaaattgagatcggataatgtgattgagatatataaagtgtacaagaagtgggatgaaaaaaatgcagtaaattatatccttcggttattcaatttacgcatgtacaataacataatttacaatgaagtaaatgatcatcagctgtatcagtttataaaagagaatttaacgcatgaaattcagaattccggagatttttactactttaaactctttaactcttttttacaacaagcctacatcacatatcataacctactcattcctactttcaatagtgttaataatattcatagtgtaaatggtgtaaatagtgttaataatgtggatatggtacaaattgctgaggaaaacagtgtaaaaattggtgggatagagatagaaatgttattaatgaagtattattgtggactggataataatttgcaatgtgtgatagtgaataatattttaagattactaagtgtcagtagtaattacaagttgtattacttgtactccaactacctgtaccaacttatcattaataaacttgtcaactcacacaccatcacactcaatcccaatcacaacaccgatgataacaccatcaatctcatacaaattaatactatactcagtagtaccagtgtggtgaaggatactgtaaatagtgtgaatagtggtaatagtgtggtaaaggatagtcgtagtgtaatgggagtggatggtataattggtataactaacttatatgattactccaatctattactacatactcttaatatacactttctcactctgttacattattctactaatgctacagatgatgcagttaggaaaattagagaggaaaataaacctaatattgctgcagatgatgctgcgtttgcaagcaccgatacgaaagaatactcaatagagagtataatgataagaataatatatataataataagatatagtcgtgagggaaatgtggagttggagcgaaacgtgatattatccgaggagttggtcaccttcttctacaaacaaatgttcacaatattcaatcattacattaataaaataccaatcctcttttattacattgttattaatcaattaatcgggtcaaccgttcacaaattactaaataatattagtatcacggtactgagtaaactgctgcaaaagtatcctaatgtagtgttatggtatataacatactttaaatactctaaaaataatactctcaacagtatttacaccaagattaccaatactgggaacactgggaacactgttaaaatttctgctgtgagtagattatcagaggtgatcgtgagatacaatgtgttgtacaacgaattatacaaattgtcactaaacaatacgaaacaaaacgatgaactaaagtatttacaaaatctcaaacagttcttctcacacacactttcacagagtactgggggtactgtaggtgtggtggacatgagtaaaggggtggactgcgggatattattgcctaactatgagatattgttgtttagtaacatttattataatgtgaataaggaatacattactaacattctagaccaaattatcaccctcaaatccaaacaaaaacccaaaatcatcacattcatcactaatctacagggctcaaataatattttggtaggatcaaaatacacaaatttggaccctaaacactgtcaaactgctgagaacactgtgaactctggtaatactgtgaacatgggtaagagaagtttcatattgaagaacgagttgaagggagatttgcgtaaggatttgcgtagtatggacagtataaagtatgtgaacaagttaatagagtacaaattccagtacaagctcccggtgttcaacgtggtaataatctcagaaatcataggcctgatccagttcctacccaatttaataaccctgaaaacgctctacaacgacgtggaacataataatcaagtagaaaatccaatctccggaggaaacatcgatatgaaaaaactcatcatgttgtatatcaaatatgtcaactccaaacactatcataattcctactacatctacaataccattctgaagatgctttataatacccagggtaccagttcacagggtactaattctaccaattctgctgctcctaatactaatactgttaatacggtaaatagtatgattgtagttgagaagggtgtaaaaagtgctgctccaggttctgctggtacatctggtactgtgggagcaggcaccgtaaatgagtattacaacagtttaatgagatatataatgaaaagggagggagtaatagaatataataaattatatgaaatgagtaataagtttaacctaagttgtagtatctggaacatcttcggatatatcataggactgggtgacagacacaccgaaaacatcctaatcgacgttaaaaacggtgatatggtacacgtagactacgattgtctatttgataagggtttgaagttactaattccggaacttgttccgttcagattaactccaatcatactacataatctgggtacgttacggtgcttggtcccgctcacacagttagttaacttattttagttactattctatttccaagctattgatatttatttttaatttactaattaaatttggtaaataagtggttgaatcagcagaaatggaggaaaatttcctcagtaaatcgtagcccgatcaacttttgcatttttttaacacaatttattaattattaaataattgtataataatgtgtaggagtgagtaatgtgaatgtgtgtgggttgtattataataatagtttaagtttctatgagatgttaacgacgaataaggaaataataaagctaattctgtacaacttcatcctcgatcccatgatcaagtgggataacatacaaaacaaaatcactctcaaactcacaaaccacatcaatatcttcaccacaacacacaataacaccgtgaataagatgaatactacgaataatcctggaaatagtgtgaataatgtgaataatcctggaaatagtgtgaataagatgaataatcctggaaatagtgtgaataagatgaataatgtgaacaatgtgggtaagggagaagttggtatggaggtgatatatataaatgagaaggtgaataataacatttacataaatgagttaattaagtcatcaatcaacaaacatttactatcaagaatgttcgtcggatgggcaccgtggatttgattacacagggagttatacacttatttacgtatccgcaccaattatccatatttgcaacatatttacatttcatttttattttactaattaaatttggtaaataagtggttaaagcagcaaaaatggagattattttcctcttcatttgctaacccgatcaactttgacaattatttccaaaatcacaaaatttctaattaaatttcaataaaaatgacaaataattaataatttagtggttgaaaaggttaagttaattgtagtttggtataattggtataccaattttgaaaataacaaaattacagaatttgaatttttactccaacactgtattgaaattatcaaacacccagaaattcagaccaatgaactccacacacactttatataataccatcctattatatattattatagtatagtaatagtatagtatagtatctacgtgttaatttaataccttgtacaatggtttaaacccttttaatgacaaattgctaagaataaactacctctaaccaactcaattaacaagatatattaactataaactatgtgtattgttaagatgtccagaaagtgttccatagaccacaaggtagctatgatgaatgtaacattgtagttcacaacacgattaaaactactaaagagtatgaaattgatctccataattacttctagatctacctaatcctcaaccataggatcttccatatgaacctttggatctcctatattaataatagatctatagtttgtagatctaatatactaaaattgagggttaagattaattagattaatatttttactgaattggataagatggtgacaacggaggttagtagtgattccaattgtgttactcctggaaaatgtgattctgtaacgataaatctggctagaaaaaagtctacagttaggtttgaatgttttgaaagatacaaatccatctatgatttttcagatgccgtagattcagtcttaacatacatggattatttgagacctcctccaaatgaatttggaaggttattaggaaaagatccatcaatttgggggacaaagaatataaataaatctacagcaagggtcttgctgtacagaggtgatgagagatatatcctggtagtgccaaccaactccaatatgacactattccacgaacgtggagactactcatgggaacgtatcaacactcaagtaaacttgtcaaagctggaaattggtgaaggatatactcatgattttcaagagtattttcattccgagttaggagattctagggacctcaacaagcttgaagattcagatccatttgaaccttattactatgatcttgatgagactaattttaaaattgttttcaatacgttttgccatagtatttcatattctgggaacataatttgggaacgaaccagagataacgctcgccacggctatcccaattccctcaattttgacctgatttcaggtgatgtaaccatcactttcatcgatggaactactgagcctctgtacagtattagacctaatgtcaaacgatctagacgtggagataattccactatcttagttaacctgaaacttgaaccaaataatgaaaattctgatataaataatgaaaattctgatataaataatgaaaattctgatataaataatgaaaattctgatataaataatgaaaattctgatgtaaataatggaaatatggtgaaggagccatttgaaccaaaggttataactctagacatatcgacgataatgtcaacaaacgagtataaaacggtttctggtccaggtttccaccatttcaaggctaatgatgggtttgtgtttgggaaaatagttgaaggccgtagagtgattaaaaaattagataatcccataaagtgctatgaagtctacgaagtctatcccgcgtattatgacaacgataattcaaatacagaacgatttcagtttctcaggcctaacaaagataatttaaaattctataccaataataaattactcatgcctgaggattacaaggttaaatctaccaagtatcgttatagaattgactttcttaagcctttatacaagataacatatggtgacaaggtaatctgggtttttgactattatgaacacgagtttctgcctaccagtctttacttcacacacatgaataacatgacactaacatttcccaatggagttcgtagagatgttaaaatcagtgttaacttgttaaaaatgtacaaacttcaaaatagtaacactgaaaatagtaagatggaactggaagaaggagactacgagattatgaaaccgggagataacaaaagattttacactttaaaagataatattaaatgtgttgaggtttggtatgatggatacatagtctggcaatatgataaagagtatcctatatcaatttgctgcgactacacattggacagagttgacattagattcactaaatatgtaggctcatttgtcagatttgaaggctccagttcgtttacgcaagttcattacttccctaaccacttaaaactctatgcacaggatgataaaattgtagaactggatcaggataattatagaattgaagttgttaattctacgactgtaaagtatgtaattaagcctgtgaaatatgaccggatgatatttgagaaatcacttttatggaaacagagaaatggagcaccaattcccaggaaaataatcaacaaacttgtaaatcccaccattctcctgcatcacgatacttcacgaaatcagacaaagatattaaaatttaaaagatacaaaggatcatggacacttaacaacttcacgagaccagaaattataactcgatattatatcacatatttatacacattaaacacatacttagacattaaccacatacttagttatcataaacacgattttactatagtaaatagggtgtcatactgtgactatataactatgttagtgctacttaatagtataaatattattgaatttgttagtgtgaaatagttgtttgaggagttgaataaaaggtcaaatttggtgtcaacacccgtaaaataagtatttaccctagtttacaacacttaaattggatttattccatcattttcagctattaaatagataatatctggttaatttggttaattaggggtttaattggttattatatatataatatataatatataatatgtatgttatattggtgataagattaatgtggtagtatgaatatttttgatgctttgagtgcgtagcggataatgtcgcagatacgtggaggaggaaaaacaagcataagttcaccatttttcttaattaatgacactgggagttgtgctccctcctcatatttccatacaattttattatttctttctaattctacacacggatcctcctcaccaaacatagttacttcagtttcaccatctgttattgttctcctagtcttgaatctggtaagtagtttcccaggctccacccagtcattagaatatcccaccatactcaaattcttcgtcttgttaccattaaacactaatttcatagtgtttctcttgagattgaataggatttggattggtaagtcatgatgaggatctgcgtaataagtccacaataacttgtcacccagtttcaagtggtaacacatgaaattcaaaaatatcctgaaaataagaccagataactccgtttcacactcttttacattagttaacttgagattcaagtcgtagagttctagttcatccaagttgtgtctagtgtgtgtaatgtcgtcccatccaccttgaggtgtaattctatggtataacacaggtttaccattaactaattcagctttatactgaacttccgtcataatttacaaggtttacagttaatatcgagtgattggtaaaggtcagtaaggcgttggtagggctagcacattcttaccaatacatataaaattctgattaaatgattgtataagggtttaaataacttgtaaatatgattaatatacttatataaagtgtagtactggtatatagttaagatagctccctctcggggtatatagttaagtgatatagtattactgtagcataatatatatagtatagtaaatgtgtaaagtaaatgtgtattgttatgatattaagtggagagattattgagtagtaaatattccctcgatgaatacccaaactttattatgtccttctcactaacaatattttcactactgtttaactaacactatagtactataaatagtgtttggtaccgtaattcgtaatatttggaggattctaattttatgtcatttatatatgtcccgtttgtactgttcaaatctatcaaatacggcctaaacatcaacaccgtttaaccacacattactactgtgtaatctggtaattaagtactacataactaggtgtagtatagtggtaggagatacaatatttcattattgatgttacggaattgtatgacggcgtgttgtttggagattgaggggtggaataaattaatatcaacaatcctgtgatccttcccaatcaaataatactcacgctcatccaactttatcacctctaacacattatattattatttatttagaaaattagtaaatttggaaataaatgtcaaaattgatcgggttagcaaatggagaggaaaataatctccatttctgctgctccaaccacttatttatgaaatttaattagtaaataaaaataaataacaataggttgggaaaatggataattattgggcttacttggaggttcagtatcattggatttgaaaatgtataaacgccaacttaaatcaggtaatacactctcctccggtaccacgtactaaaattaactttattatagtgtgtaaataagtaaataactgtgtaaaaatgtgtagaagatactttaagttgtattccgttgcgattattggtttcagaagcgagtagtcctgaaggttcaaaattcggtttctccttctcatctacaaaaaattattaatttataaattaattaaaaaattgttaaattaattaaaattttgttaaataattaaaatttttactcggtttggaatcttcaggttcgtaggcttctttgttgtatttttcgggtttaatttccggttttatgtcttttttagttttatatacattatcataattatatttatgcataataggtgattattatatatattgtggccacatattaatatttttcaacagcatgacaatttcttatattatgctgtaattcagttaatttactcatcatctccttaaacaaattattattctcagtcattctctccttcatttctgatactatttttttcacatctccattccaaactccatctaccccgttaactccattaaccttattactaccatttaaggtatcaactccatgaatatggcctagaatgatttccctgagataattataattttgattgtaaaagtatagcaattgtgttttattttgattattccgctcatttcttagtttttttgttatttcttccagttcttttaataaattattaatttccgattttcgggactcgatctcactagttaaccttttgttactctgttccacccactccgacactgacgccctaatctcttccatatcttcctgtagtttattatttgtctgcactgagttattgattaaatcttgtagctttagtgtccactggtcccttttatcttctaataactttttaaacgaaatttgtaagttttcgctccgagtattaatttgtgagatccacctgttaacctgagtgttcactaccgtagtgaaggcctctgtaagagtcatgatgtcacagtgggaatgtgtagttaaggcacattcagagcagaaacagtgaacattacaactgagacagtagtattgaattggtaactcatagtggtctggacaacgcgcgttctcaatcatcacatgggatcccagagagtccaatgtacacaattttcccacttctctcgttacggacattctaatgtgtagtgagtagtgagtagtatggttggtaaatttgtagttgcgagtttacagttttttacactttgtcaaattttccaaatattaccacaatattactctagtaatactgtgttaatttgtaaatgtgttagtaatttgtaaatgtgtttagacaattttgaaaactgatgaaaattttacacatcaaaataataaaataatttacaaaattatttaattttattattattattttataaatcgatttattattagataaataaactttatttgtgtagtgggtgatttgcacatgatgcatatttggcagttaataccttccaaaattcggaagttcttccaaccactttactacacaattttctcacaaatattcattatttttcattatcaactcataaatttgattatttttatcattttcaacttttttcacaattttaacaatttttaacatttttcacatttttaacaattttgacattttttatcctaatccggatctaacaattagatctaacaattattcaaattttaaaaaaaattaatagatctaaaaattattaattttgtgaaattctggaataaaactcatggacgatgttgaaacgggttactattccgaattaagctcctctgacatgtcaaactccatacacaatacaacaaatcaatcaactggacctacgggtgatccgagaccctcagaacctacgcagagtaaccccgaacctgcagaaccggtggaaacagagttaataagtggaatgaatgagatatactcgttggacaggggaaagacgaagttgtataaagaatttttaaagttatactcagactctgacgagggtcagaaattcgcagagtctgacagctttgagcgaggtcaaaccaggagaaaactactcctgtggcttttaattatcgttttaatctccaacccaatcctcggcggttataatctacaccatttcacaagttattttaataacttcaccactacacaactcagtaaggcgtttccacagaatactgaggtaactaaagagttgagtaaaaagtggtatcaattttcattcaatacacaaggtgtaagcagtcaaggtaataacatagttaatatagtatagattagtattttgagtccggggtagttaccgggtgaatcccgaggggtactatatcttaactatatatccctagagggagctactttactatataactataatgctatatacccctagagggatctacttaactatatactttgtggtaataactacttgtagacactgtaaacacaaaccctgtggaccctttggataaccctcgaattcttgagttcaagagagtttgtgacgagataagtgttagaattcgtaggtatagcttttatgaagtgtttggtgagataatctttggtattttcagcctagtgctcatgagtctgtgtaagttaccgtgcaataacgggaactccatccgtttcatgatgcccatgctattcattctctacatgctcatttaccgatttctcgccttttacatcttgtttaccacgctgaaaattgggttctactcactagttactttgaagcccagggtactccagtatgttccctactttttagtatatattttaagcattcggaatcttgatccttatgacagtgttaccttggaaatgctgagtaagttatatgtgttggacagttggggtataaaaatgctgtggttgttctgtctggagaatgtccacataacattttccgaatcgttagaactctttacgctggtggtaaaattaattatttccagactacgtaaggtgtttggtcgtagtgacttgaatttctattcgagtaacgacggggggtttaagttgtttaggaattgttttagtagagacacttttagtagttcggatccacatgagaaatatattcactcgttgtataactacgccagtgacattgggacatatttgaagaatattgacgttggagactactcgcaaggacttgacgatctcacaaataaatttaaaaatcggaaattaaactattaatcacactacacattcagttttgtatagtatttatgttattttaagtattttaggggttatttagtcttattttagggttatttagaagttttttaggagttatttaggccttgtaaattagtagtttagggcctagttacccttcgtacacagctaattttttttaattatgaattttctgatgcttaacaatgttaaatatgttgatttgtgtggaaatttggaatttttaaaaatttcgatttttggccattttggcccggacccaaaagtgacatttgggttccgaaaaaaataaaaatttttcgactattgagaaaattaaattaattaatcccaaatcattccaaacatcattttagacatcaaactacttttaattagttctaaaagttgttaattagtatagaaaatttggcttctctgtgtatcctttgctgtacataacggggtattaaccactattatctctctgctatagagaaattttctaattattaccctaaaaatagataattctggttgaaattattagtaaattattagaaaattagtttaaaaaattagatttctgagctaaaaaattttagaaccctcgttaaaatttacaaactaaatataaaaatccttatttataatgctagaatactcttaaaactattatctatataactacgattcgatattttttatatatttggtgcttattgctatagctatgtacttgacctggccctgacaacccacttctggagacctatctatacctaaaataatccactacaatactctcaactaatgtttaatacctaatatatctataatgtgtacttagaacaccttgagtactgtacctaataactaaacccagacacctgacatcctaccactaaacccttaactatataccccgagagggagctactttaactatatactcttagatatacccctaaggggagatacttaactatataaggggagagggagctacttaactatatacttagtgatatacttaatactatatattatactatatattatatactatatgtatagtagtacattatcataccataccatacccctaatacctcgtcatttacacatctttaacacacgtatttactacttaacactatgattacatgtataatgtaagtattgtgatgagattataaaagtacaagacctaaggtgaaccctgtgagaagaccgaatgttgctgatgacagttgtgagtctgtcattgactgatgtaacgttttaagaaattcaaagttatctccagtctccaagttcatcttactcaatatcaactccattaacctcgacatacgaattgttatatatcccaccaacttattaaaatccacattcacatatccatgcctattcaatacctgtaacaatactattaatattattatgtggttaatgtgttaaccctgataacacatatttcatcatcaaatataatatctacacaactaaataatataattttaaattaaacaaattaaataaaaatgtgtaattgtgtaattgtgtaaagaaatacgagaacgatgagaagtgttccggaagcgagtacgaagaaagttctgagagctttagtgaagacaagggagagcccggtgccgaatccaagtcctccaacgtatgaagaaaggttaaacgccgaggtcttagtgaagcccagtgctctcgcgacaaattcctcaaactcgaccgtatttaccatttttacatttaattttattattctttacaaaatgtgtaagttaattgttttataatttaattatttagaatggggaccagaaatttaacttttatcttttttacacttttataaactaattatattattatatattaattttgtatataataatttatgtgttggagtgggattaaaagttgttcatggacatgtgtccgaaatccatttccaaattatccaattccgacaccagctccgatatgttcttctctctaactctaacttcaggttgattctccaccttttctacactatcctccgtactctccactctgacaaccttatctccctcgtctaccttctctacagtatccacagtatccacattatcgactgtattaacactatgaacagtattaacagtgttaacagtgttggtattacgggatatgggagagctggggagattgatgaagttgttgatgagttcttcttcgtcttcttcatcgtcttcgtcaattagttgttcgttcttatcgttaaaatttataaagttaaatatctcatccaagtccacctctacatctctctctccctctcctcttatattattagctccctctccctctcgctccttacccataggagtcatagtagtaaaagggtctacagtgttaacactatcaacatgacacacagtgtcttcagtgttagcactaacgggactagtggttgtgagtagtagaagagagtcattgagtttgagtattttgtcgagtagttgtgtttgatagttgttgagtgagggtttgttggacaaaatgttaatactagtgattagcttatttctcacactgtttatatactccagagtataattgttattgtttatattatacaataactcatccaactcctccaacccaatcacattacccacacagtctcccactgactcagtatgagtgtgagagggtagtgagggacgtaaaagttgtttgtcttgatcgttgatggtggggaatttgatgccccggagtctcatgtccttatacccgtcgtaaaataccacatactggtcttgctcaaataaatacagttctactcatcattcagttaattatattaactatataaattataaattatataaaaggtatagaggtaaatagtatggggataccgtagtagagttgtatgttgtagagaattttggatttgaagatgtggattcggatatcagtggagatcccagggtgaatgtaattactcttacccactaaaacatattacaatattttcaacgttaactatttatgatcaaattgacgtaaaaataattaaaaataattgattttaaaaataaagtcaaaagttgatcgggttagcaaatggagtggaaaatatcctccacattgctgctgtaaccagttatttatcaaatttaattagtaaattgtaaaataaatgtcaaaaaggttgcaaattatgtaaataatggggtaaggtaattagggctaactaggaaattggtgccccgcagtgacaccgtaacggatacctaagattttagtaattttctttttaacgtttgatgtgatggaggatttaaaattcgtaacaaataacaacttcctcagtgtcttcatcaaagacttcgtaaacaggactaaaaaatacccgccaaactcattcaaacatgagaataacagttccagactaagaataatttcctcgggtttctttgtgcatcgcatcttccaggtgataaacttaataacaaatatgcagcaatctttcctatttctaatgtatgtcatgatcttatcccggactgtagcgttgataatgctgaaattattaattgactccatggtgggtgctccaaaccggtccttctcaatgttaatttcaatcagaaaatccttaaaactcagacagtattcaatgattatcacgagttcacgatgtgtcctaatgtcatccgtagtggtaattcggttgattatgttatttatgccatactgactggagggtctcaagtctgtgtaaatgtattgaattcctccggtgacgggtgccgcaggactactctgttctcctctctgtccctgtccaacgtattgtccaccctgtggtgtaccatgtgatgtactatagtgtccgctacgtgtgttatgtgtgttatagtgtggattcgagacggcgtagggattgggttgagtggagtaataattactgctgctatgagtgagagagttggacagagtaataagtttattagtcaaagatttagcgcaatgagttgtgatgcttttaatttgttttaaattaatgtttttttttctattttccgtaaaaggctccgaactcccagatacattcgaacaataatgttggccgtactgcggattatattgttgtccatactgaggattatactgttggttatgtggttgatttggagtattgcgagagatgatacgtcgatgagtattatcatccatgtcccccatctatacgtagtaacgaggttaaaaccttattaataagatcaagatggtaaaaaaataaaataaataaatttttttaaaaaaattaaatttgggtaaaaaaatgtaaataaaaataaaaattaatattctgagacccgataaacatttttattgatattttttaaaaaatattcaaatctcatttttatatacaaaatacaattaatgtttattaatattaattatactgttttatacttaaattgggaatatagaaatttgaggttatcacaccttagggagagaatttggaataatttggactaataatttgtgatggaattcacggcaaaacaattattagatgaattaatcaataaaatcgaaaaatcacaacaacatcatgtagtctactcaagtattcagttatctgttatctatgtgttatgtatggataattgtgaaaaatagctaaataataagaagtgtgaaattatctcccctttgggggtatatagttgtataggcagagggagcattgggatccgacagcatattaaatccgaattgtatattgaatacaaaaagttcatttaaaacagaaataaaagattgtgacaagaattcattggataattcaattttatttgatttttctcttaatcttccgtgtagccaacattgtaccacagtacaaaagggaaatgacacaattagtaatatcttagctaataaatataaactactcacacacagtgtgagtactaagaagagaaaaacagtagtcagaggatatgaaaaagtggtaaaggacgttggtgagatgttaaaagtgaagaaagatgtgtgtaatttattgtttagtcactttccaaagtatctaaacagttgtttccggttcaaagttggtgaactttgttacctcaagtggtatgacgaattgtgtctcgttattatcaattttgcctctcaaaaacttttaatcagctcaggtccgttacggtgcttgtactcacggcacagctccctcttggtgttctagttcctcagttaaatagttagttaccttaccccattatttacacaatttgcatttttttggtatttatttatttattactaattaaatttggtaaataagtggttaaagcagcaatactgaggataatttcctcggtattttgtagcccgatcaactttggcattttattttattacaccgaatttaacaaatttaattaaaattattctataatattaaaaatgttgtagataacgatttcgatgacaattacgacaattacgaccaggaaagaagcactcaagtaacattagtatgaataatattgagtaggaccgtaggaatatatggttgtatgatataaatgaggaggtgtttttggaccatgataaccataacctttactccaaattaaatgagcttaaacccatcaacattctactcgataataatttcacctacaacttcacacacaacttcaaagatttcaaagataaacactctctacggtattatttacactgttacacatccccactaattatctattttgcaacctttttgatattttatttatttttgttaattgttttttggtaaataagaggttgaagcagcggaaatggaaattattttcctctccaattcctaacccgatcaacttttgcgttttattttttttacccctgatttctaattattttttccttaatttgatagataataatttgtagatattattttattccaatgtattatgtgacgtttcctggttacaagcggcgttgttccaagttattccggttctgggttcaggaaaaagacctaatcaagttcaaatccatcaagttcctcgccatcaaagatcttaaacccttgaaagatattaaaccctcaaaggatctgaaacccatgaaggagttgagtaaatctgggaaagacattaaatctgttaaggaacttaaatctggtaaagaagttaaatctgtgaaagaaacgaagaattcgaaggaaacgggtaaatctaaagaagtgaagaaagatctgaaaaaagatgtaaagggtaaagagttgaagaatatgaaaggtaaggataagaagaacgttgaggtgactaacagttgttcctatgtgataatgaggacaaggggtgataagttatggaataaacgcaagatcttacccattaacgaatacgtttacgatgttatacataacttatatcatcacgatttagtgtcagggagatatatttcaagtacgttacggtgcctgtactcacttagttatttattagttagcctcccctatctgactctttcccctccacagtccctaattactcattcactatttagttgtatagttaattagtcatatataactagctcccctgggtagtcccccgcctcactactatccgggccaattcccgcttgactttggaattcacactagatatgtatattccactccactattccaactatttactcagtaaattctattatactcaaaatactataataatatactaaatactataatatactaagcaatataataatgatgagtgttgtagataatgaattcttttgtaataatggatatgtaccttgggtgatcccaaaggctgtgagaaaagtagtaattcgtcatcacagacttgttactactgataaaataactatccggcagactatcaaatatcgtaaatccatccacctcattatacaaaattttaagtttctactacttctcatctccaaactcaccaacccacatactcaatatattaacaagggtaatggtattaacaatggtaacacggtagacaatttggaccaactgggcgtagtaagtatgtatataataaataacttggagatgaatgggaatataacaaagtttaatgagacttatattaataatttatactggcttgatgtgttgctgttgtggatcgaccacttttttctcaataactgctgctacacactcagcgaatataaccaactgcaacatctcaccaaactatacaatcacactcttacacaattgctcagtacgttgcctctgatagttacttggtatgtagttatatagttatgtagttaacatagtacgtagttatacagtaaaaatttgaaaagggatgaaaatttttaaaattattattacaacgttaaaataataaaaataatgtgtgtattgtgtaaattaaaattattttttaaaatggtaaaaaataatgaataattttagattacgaatatctatgtcgcgtactaacgtttgatatgttttacaagaattttctatcgaggatacaaaagaataataaacactttgccaactatttacctgtgatacagttgctactgtattacctcgcgttcatcgctgatgattacaccaaccactcactctacggcattaaaactccgcaataatttttcaactcaattacacattagatcataatttacaaattttaattgtaaatttcatgattttgggaataattgccaaaattgatcgggctaggaaatgccgacgaaatttttcgtcaatattgccgcagtaactacttatttaccaaatttaattgtaaaaaataaaataattgtaaagaggttgtaaaaatcagaaataatggggatgtgtaaccaattactgtaatcacttgtatgattatgggattccataaaatattagtgaaaaataacaaatgtgtaaataatgatatatttaaatggataaatataaatatataaaatgagataatggaggtttgggatagattttcggggctttttagagccttccgtgacatatcacaattgaaccaaatttcaacgtaaaattaattttttagttaattttaggggataaaataattttaaaatgttaaattagtgtaaattaggttagttggtgtgtaggagtagtttgtaaaagggtaagatgcatgttagtacacctttgatgtacgcaactttgtcgtttaaaacgttaaatttgtactttataattttaccatcgcacatctttagtcacaaaattgcctctcgcaattttttacatcttatcaaaatcaacaaaaattaatactaaacatcagaaattaacgataaaattgaaataattaacataaattaaaaataatcaaagataaagtagagaaaattttcaaagtaaaattgctaacacattgttaaattaacgcttaaaattgagaaaaaaaagtaaattaagcctaaaaattgctaaacttattgtaaactaagctgaaatacagctttaaaattcttaaactaatcataaaattgaattaaaattaacataaaattgaacaaattcaaggtaaaatacggctaaaaatccaaaattttcgcttacaaaggataaaataatctgaaataattgtaaaaaagtgtggtgatgagtgatttgggagtgttgaagcgttctgggattgggcgttttaggtccaattcaccgggaaatcataaaactctcaacaaaactttctactacaaacccaaactcaacttcaataaccgaaacaaccaaactgtctacaacacaagtaacgaatctgacaccaccaaacacctcaaaaacacctgggacaataccacaaatacacgtaaatcacactatacatcacttaaccactatattatacacttaattataaacttaattataaacttaactatatactattgataaattgtagaggaggatgagctgaataatgagacgatccatgctgttgggactgtgggattggtactggacagaacattggtggaggtggaaaacgaacacgtatgtttgtctggaagaagattagaagagtttagaacacgtcactgtccgttttacctcaggcagatgtgtgtcaattccagtcggtgtgacatgagtcattcggagacatggccacgcaggaatccagcacatttccgttacgactataaattgtgtccaaatattcaattcttccggcacggcaacaagatgcaactgcaagggaagtgcagttacggcaggagatgcaaattcagtcactcaaaagaggaacaactttatcatcccgatttatacaagacaaggtactgcgttaactatcccaattgcaagggttactactgtccatttgcacattccaaagaggaattaagaactattaatcactactcacatgggaatacacagttcagtcagagccaagtaggtggccagtttaccaatgagaaatacggcaccgaatatggtacggaatttggtactgaatatggtactgaatatggtaaggagtttggtactgtgagtacactgaattatactctggaaaaggttgatcaaggtaataatctaccccttagatatttaactattggtaaattatgagtaaattgagtaaactgtgtgaagaaattggtgaggaaaaaagagcagcaaaaatgaaaattttcgctctcggaccagtcaatggagtatactggtcctagacctctctaacccactcttacgcattatttacttaattatataactatactaatagtgttaatataataatattgtagatgaggaagtaattaaggaattggcgatagtggatgaatcagtggaaaaggaaactgataccaatagcacttgtagtaacactgcggaagagtcaaccaacttctctcccgaatcacccaaatcattatccgattcgaccaaatcattactggaatcaccaaaatcaggggtggaatcaccggattgttcgcgggaccagggtagtttatccccggatttacgagatttcacgagtgatttaacgcatttatcacaggagctgagagagttatcaggaaacattcaattgtccgagttaaaggaggaggaggaggattacaactggtttgaagacgtgattaaaagcggtttaagtctgctggaccaggaggaaaaaggtgaaaagaggtgtcaaatatgctcaggatgccttgataggcaaaatggcactgaagtaccgctggaatctgaccacttctccaaacaataccaagacctcttcaaactctgggataaagatttttaacactcaatctcgtaaaattttaatttattaaatttataaaatttattaaattgtgaaaatttttaaaattaatgtaaaattggcctgatgtgtagatgttgtgaagtattggaattttttctctagaattaaatttttaactaaaaaatattaaattaatgtaaagtataaataatttagtgtaaatttacagaaaatgtgtaaattacaatgtctagaataaaatgtgtaaaataaccatttaacagcgtaaacatcactaaatagctcgtgctaatgttgagttatatagtgaatggattaattcgtgtgtttgggcgtgagttggtagaggcttggatcccgctggatcatgtctgtgtgacatcactgactgatcctgagattcatctggctgacatatcaattccggaaattgtgttttcaaattattcctcaccgtttgcactggtgagttcaaatattcgaagaattgttgtgagagctgactggtcagcgttgttcagaggtgggaaaaaaggccgaatcagagtcgacgttgagggcatagatctcgtagtaagagccaagagattggatgaatttgaccctaaactatgtttatcactgctgagtagtaagaaaaggtcaaatttggctaaatggctgaaattttccaaactcaattccaccgccgataagacggcgaaaatcgtaaatttgctctctgtaagagctaaagatgtgaaaattacattcgtagacgatgtcatctataggactccgttctctgtagtcattagagctgatcttgtcaccggtggatatgtagaccccaaaagccctttaatgaacaattttgaacgtgaaggctatcttaaacattttttaatgtgtttattcttcaagagtaaaggagttcaaattgattttaatctttactccaattcattcacctctcacatagttgacacttcggatacttctgagagtgttacgagtgatacttttgaaggtgaatatcacagatctaacagtgatatcagtactagtgatggtgaatcgcattttagtgatgagttattttcatctgaggtgtctgaggattttgagcaggtccagttggaggattttctacaggtaaaacgcagtgatttttgtaatttttgctctcagacaccgagaaaaataattaaactcccagttaaacaatcggaattgagatatttgaacctgttgaacacacctcacaagaggtttaagttaacttcgagaacaggaatttacgtcggaatttcagttaaagtttggaattttaactctgttttcttcgtcaatgggatctctcaagagccgatgaagaagataaaattgtttttatgttccaatgaggggacggagcagcaattttatgcccaattgtttgatggctcaattaagtacccgcagctaaaattaaacttgtgcagcgaatttgtgcacatgttacatgatttcatacggtttgtaagaatattatccgcgtttaaacatgcagcttcagcttcctgctgtaaagttccaacactacaaaatgctctcaaatactgtaaaatcatccaacaaaataataaatcaagagatgaaattgattttttaaccaaatttgaacatgaaacgtcaataggaataattatcagacttagaaatttcacactcaaacgtggtcacagaggtgaccacgggactaattcctggccatctgccactgaaaacacagtggaaccagtggatagaataagaatagagaagatatttggtgaagaaaagtatgacgaagagtttagaagaaattttgtgaatatggaggcagatcagtacggttcaaacttctttaattttaatcatttgctgaggagtggaaagggtttaggacttaaacctgagagtactaacaatgatcactggtttctaggcctaatgagcttcggtatcatcgctccaaatctgtccgtaaacctgataccagtgacgagattattaaacagtagccatagtatgacgtctaactcttacgctgaaacacataatactcagagtttaatgtgtttgagagcagatttatcggtgttttattttaatatagtgcagatgtcagaccgtagaagttctataaaaatacatttaagtaagcctttgtgtttactggccagaattgagtctgagataaggaaattttccttttcttgtgatgtcgtttggggaaaagtgtttggagaacaattagtggcaggaccaatgagtatactggaggattttcaaggcttttttcagaatttcggggcagacaatgtaaatcaatttaatgttcagaatgtgtcagatgatgcgatttcagtgggaattgaagcgtatacgaattttgtgaagaagaatctggtcaatatgggccgattcttcctcataggaaatacggcactggaactttacaacaccgtagaatcaaatcttacagccagggtaacaagagaattactcagttttgaactatttctacatagaacttttgtcaatacgggctacacagtcgataaagttggatatgcgttgaaaaatgacactttgtattctgaagaggatctcgaccagattgacaagtttattgattctatggaccagaatctcaaatctttaatcctaatgatacgtgaaaaactctgtatgaagaatagaaacttggttaatttcacaggccaggacatgaaattactttgtttcttcggtaactgtacagagaaaatacataaagacgccaaggatctttttcaacagaatcaacaaattataaacaattggtcgcagaaacattctatcgactactattatccccaaacacacagggtaagatcggtggagagtactgatgtccgaatgttggttcggaatgaggaagaaagttttttgtacgatttggataaatattgtgactggttcagtaacgcgagaaataacttattctacgtcaaatcactgaattttatgtctaacaagtgtctggaggtaacactcaagagtattaatgtactcgtagactcctacacatcttccaaaaaaattaccataaaatacctcaaaattaatactaaccaccctaacactgctagttccgctgatatcgccgttgacactactaacaaagttgacagtgtgttaatgagtgttagggagtttggaatacatttaattaaggaacggggagtatttctggtaaatctggacaaagtcatgataagctcaaacttaatacagttaacgccgttagcgcagtttattgaccaaatggtgttaaagtgtattggtataaaggagttggtagataatttgaaggaaagcagttgttttccacagtcaatgtcatattttgaaattaaacctgactttacacctcatgacttttttaactttgatcctgcaactgagaaattgaggctagaatttgagaaatctgtttacctcttaatgacatgttactgtgtgcccgtttacgagtctaaagttattaaattttactctgactgggatattaaattggttttgacccttagagacttcactgttttgcttgtaaaaaatgatacaattctctgctcttttattatttatagcttaaatttagacctctttaaagcacaaaataggcttaaagtaaaggttaatttaggtgggtcaaatttattaatgcataattttatgtccagtgaggaacctgaacaggttgacggaggatatgaagtgttgatgggatgtaaaatggaagatttgcagaggaatgaaatcacctcaaaatcagtggaaaatggacaaatttcactcaaaattgagaaaaatcccaaactaaaagttaaactagaactaagaaatttatacctcaaatatgatcaactactcatcaattattttattgaacaatacaactacgttaatacgcacacaattaactcagttggtagtgttgaccctgttgagagtgttgagggaagtaaaaagtctcaggagaatttggaaatatttgtgagtacaattggattttgtgtgtatttggacaattttggcctagttttggatcttttttgtcacttcaacatgactggtgtgaggttatctttggatgttacgagactgtctttaggtttattacactcaaattttctgcgatttctaacactttcactcattgatttacaactttcacttgagaattattcaatttttaagccaaatgaagttgattctcaggatcaaaatctggactcagaaatgctgctaaaactgtcacaaatcgccctgtggtaccatattcacaataatactactcaacccctggaaaatcccatagttagctcggtaactgaagtgtttgctggaattagtgaattatttaatgagtattggtttagtcatgtgacatggtgtttattaccaacttgtactgaagatgacctcttggtaccaattttttatactaaaatgtcatcattcgcaaggcttaaacctgtgttaaatagggaatatattagtcagtatctagtccactatgcctctgtaaaccctcagacatcggagctactaagttcctcaaatttaaaccgtttaattgataaattcattaaaaatgtacaaatagttgagaattcagatgatttacaagttaattgtgatgtcaaatctaatagaattggctccgtggtttacacaaaaggtgatgtaaaagtaggtgaatttctcttcaatttagaccttaacatgattaaagagttgatttcatatgttaaatctgttgcacagggtgtgaataatatcaagcactacttacacttaaataatgttgatactgtggtgatggaggaagatttgggagatcaggaaaaactaagtgttttagctgagattcaattaaacctcatgtgtaatgttactttattatcctgtgactattcattaaatgtagactacaaatttcttccacacaccgcaaactcaattgaaacggttagggataggttcagaattctgaaagtttatcctcagaataaggcaatggcaagttttacatatagtttaaaggctttggtacagtataacatggatgaggatcaaatttactccatttcaaggcatgcagggtctgaaattgacccagaaacccttgatttagtaagtgaacaattttatacttttgatggtaacataattttaacgctttataactgcgtttttctacttgatttgtacactaatcacccgaaaaatcttattcattacgatggtagtccaactgacagcagaccctcggataataacccccagggtaaattaatgagaactacaagtgttgaattatttgatgatcctaaagacaagtttgagttgataaaaatattaaatttgtcaataaacaacaagagaataaattttgtaaaaaatggcacaagaagtttatgtcaagtttcacttttaaattttcaggttttggactgttttggtaaatatgttcttgataatgttcatgaaaccagagctaaagcagcgcaaatttatgatattaatgaggaatttcttggtaaaaacagaagtcaaatttttataagcctttctaaaaacacggattcacacagattaaacattgtggtggataatacgagaactgaaatacatccagactttgttaacattctcttaatactttttatgtcattcagtgattcaaacttgtttaaacctcggaaaccaagtgttaaagctcagtcaatttcccctgtgaaaacacctttaaactttactgtaactttaaatatgtatgaactatggatatttccaaatgttaactattatactgataatactagtggcgaggaaattgctgctgtaactgctgctaatactgttaacactaataactcccttgagaatatggagaatgaagttataccgaagatattgaaaggtacgagtgatgtggaaatggagactggaatgtatccgaagacttatgatgacaaaatgcacgtgatttgtatcttatttagtggtacaatttctaactctaacaactattataaagcgttggttagacatttttcagtgagtttgggtgctgttttacttgtagaaaataaccacaaactgcttgtggaccagaatgacgggctcatcatcgcaaaagtaaatgatccatgtaaccgattcctacttgaacttaggaactttttagtcaaatttaaactaactacagagggaaatgagaaaaatctgttaattcagtctgaacttgaaaatgctaaaatctgtgcctcactacaagatcttgtacgactttactatctcaaagatttcctaatcccacaatacatcacacaaattctggataaaagtgctaatactgttgatgctgcggataattttgagccagttgaggtagtggatgactcactggttaactccgttgatgttgagaatgttgaggaaatccttggtagaatgggaattgatgagaaaattgctgtgaataagtcagtggtattatttgagaaattggacaaattgtacaacttaagccagaaaagattctgtgtaaatgtgttgctacgggagtttaaggtcataatgcctacaggtccaaattctctaatcttaggcctggtaataaataacttcattttagaccttttaaaccctaaaaataatacttcagaggctccaaactttacaatcgcattcctgtttaacctttcactactcaataacaaattcaatatcagtgattatctcctacaaaacacacagtttaagctctccatcaatactaatactggtgatactgacgatactgactcttcagaggacactattagcagcagtgtagagagtgtgaatgagagagaattgagtgtaaatgtgcaactgggaatagtgtcggtggattttaataataatatgagtagactgataaaatacttcataacaacattaaagcgtataaaagagatagaaaaaagtatagaaagtagtagaatcactgtatacaatgagctggagtatgagatttgtgttttcagtgggaatgtgaaacgtgaattagactactttacagtggaaaaagacgctagtgtgaacctatttaaccgtgaatttacccttttaattaataataaaaagggtattttctcaaattgtgatgtccttcttgggtatctggataataatcttctctttggaaatacgaataatgtcacggatttcattaatttacacagctattccactaatcaaaccgataccaaaagtaataataaaaagagaattacaatttcttatacacatttgccctctggtacatttgtcggtaattctcacaacccgatcaacactgttaactcaatggatagggataataattatatatatttgggtcgttatgaagggaatgagagtgtgttaaatctcccgagtgtcggtggtgtaatactaattcatcaaataaatgataaagttatcgtcagcactaatgtcagaattgaaaatctaactgatattcccttcacaatctcacactataataataatgttaagaattctgtagtgagtagcagtgtggattcagtggatggcctggtgttagaaaagtttacgagtgtgggagtaccaatttcatggtataacacgagacagatgccgataataacatattcaggatcgaataatgataatttaggctttgggatgttgaaaagtgtgttaaataatccaattttagcctctcctgaggataaaaataaacatgaagaagaaattttaaggttcagaaatggccttagtcttgtttgtacctgcaccagtcaacctgtaaacgacattaacgaacttgaatctgtaaaatttattatcagaattgaaccaatgctaagtattgtaaataagttaccatttgacttaattgtacacatttcaacattgaaacagacttcggataaatatatttccacccatgagaatcctgattcaatctcactaatccaaaacaacgccggaattaaacttttgaaccctaaccaaacctggggaattccaatccaaaataataaattctatctcaaacttactcttaaaggttgttcactcacttttaacacagtgtctaaaccaataaattccaaaactaccgagttgttagaatttaaaagtgatatgtttgaggtaaatttacccaatactggcagttttgtcaccagtaaaggattaacatttagttcaggaccgatttttgagactacttttaaacattttgaaccgctgctgtcccacccctcttatcgcagaaataaagaagttttctaccaagtagtcaagaaaaattatgttagcttaaatttgaataggaataaagttactcttttctggccgtacatttttgagaattttactaatcatttcttgtgtcttaatgggtatttaataccgccaaactttaaattttacaccactgccaaagaagcaaataattctaaacttagagcctactataggagtaaccagttggatttaaagggttcagtgtatttacctacgagtcaagttgaaaaattagatttctcatccacgacatcaaatcgaccaccaatcaacctacaaatactcgacacaaatgataacactgttgacactgttactactaaacaattgactggctcacttaataatgtagagacagtatcattggagagtttacaaacacttaattctgtagtggcagaatctgatactgcctctgctgaatcatcagaaaccgcttcagaaaatgatataacggaaaaaaacaagaaaaaaaagtatgaaaaggggtttgaagacaaggaatgtattagtttaggttgcagtgttagggttttaggtctatcaaagttgaacactagagtcgtggttttccataattattacacatttgtgaataaattaccatatgacattgttcttaaaactgcaattaatcaggaaactgtaattaaatctaatgaacagcttagtgtaaacacgacttacaaagacttgaaaatggatatactacacagttcaactaaatttacttgtaatttaactcttgtacctcataaaatacctttacacttacaaattaaaccaaataacataaattacacaggaccggccagtaaaatatcgccagataaacaaataaataacacagttgacattaacagtgtgaactcagtggatatgatattggatgtgaatatagttgagggtaaatttgagtatggattaccttgtaaatttaatgggctttactatgtcatctcagttgccaccaataccacttaccaactcttcaatctcacctcactcaatctctacatcattgatcccaatcatattaacactgctgacaataccaactcagttccaaataacactgttaatgtgttggaatgggataatataacagtgttggaaaggttaaaattgacaccttatgtattatataaaaatgatgatagaagattagcattcacagttaatctcaatagtaattggaaaatatataacattgacactcttaaaagtattaaatcttatcctgtcgaatatctaaactctgatcctctaaacactagtaccacagtttacataacttgtgtaatgaaaagtgatggaacaagagttatttgttttgttgatgattatttattattgtgtaaactgctgcagagggttgaattattacaagttaacagaattaacagtgtctggtctaagattgtgctcacattttcaacacccagaatcactactacaatgtccagtaagaagaaaatggtactagcagcacatgttaataatctaaacttcacattatctctttggaaacgggggattaataccaattcttccaacaccaatactccctccagtacaccccgtaacactggtaacactggtaacacatctgttaactctcttaactatgtaaatagtgtggagagtttggagagtggagagaatgattgggtggtagatgtgggtttgagtataaagggatgtcatatagaccattttgtccaaggttttataccagtgattttaaaggctataactaatagacattcggtccaggaatcattcctagcgtttagaatgacttgtactcttttctcaagaactattcaaacttttgataaaatttttatcaagttgagtcctctgagtttaaacgtggaaatgagagttattgaacaaattgttgactatttcgaaactataacctcggcgtacactaatacaccaggtgaaaaactggagaatccaactaataaaaatggtgctccaatcccctgttacagcgacaaaaagagaacctatggcaaaaaatactttaagatgatgagaattgagccgataactgtgattttggcgataagaacttcagatgttaaattaagtagacaaagtttacaattgttggatgctctgccacttgatacgccgtcagtttgtgtacactttttcgcggaacaagttactcagactgtggcgacatttgaggaacttgcaaatgtactgaggaattcctactttaaacagctgattagacaatctcttcccagtgcttggctttcaaattcatttgcagttttacacggtgtgatgaagggatttgtgtaccttttttctcaaccctttagtggctgtaaaaagttcaaaaactcctttgaaggctttttaattgggattaataatggaataaagttctttgtattatttgtggtaggaggagctgcacaatccataggacatttacttaacattttttataaaattttgggtaaaaagaatgctaaacctgtgggaattctagatggactttggctaggacttaatagtttagtattagacattctttacaatccttggaacagattcttctcagaatttcatcttggctttggggtaaaacggtttcttagaaatactctcaacggtgtcagatgtattttaagtcctgtaactgctgttgtgaatcttctagtctcagttgttgatggactttccaatgtcctactgggtgattttgaacagtttacacatctttacgagacagatcagctgaaagatgaaactaattccacagtcccacaccctgagaagagagaatttttacaaagattgaaaaccatacgaagtagtatacgaatataaacacactattaatattatattcattatgcatagtaactagtaaatgtatgtgtataatggtaaaaattgtgataaaatattaaaatgttgaattatttgcgaattgagtgtaatacggtgagaacaacaaagatcataaaagtgacggcgtggttatggtaattaatacaggcttcagcataaggtgtagcagggtcaaatccgcccatattcgtacgccatcgttcaggagcatccggactatgcaatacattaacaatagaatagaaatggtatatatattgtgtaaagtatatatctgagagttttggtataaaaatactatgttggattaattgcaaattttggaaaatgtaatcgttgtcgtatgaaatttataaaatttacacttttaaaagtatttttatctctattctccaatgtcattttatcatcgataaaacaaataatgatattgtatacttaaaatagaagtaagaataaatgagtgggggtgtaacacatttaggtgtaataattaaaaattagtttaaaagtttaaaaatactttaaaatacttgatttatcaataaatcattctgaaattactaaacaccaaccttaaaattgattgtttggaataaatttcatgagattcttctccacatatttatttattatttttctttaattttatacattttatttgaattttcatatttcaattttatcctcttgattatttatttctcatggtgtatcttctaattacaatttatattatcatctcctgtaaatttttaattggtatttctcgtacaaattgagtaatttctcatcatttctcctctaaatacacttgataaattattaattaggattctaatactataatttataccctgtattatagtatacatttggtactgaatcaaggggaaattaacttttttggatctaaaagtttctcttgaaaagtttagaaaaactaatcaacggtttaaaatgattagaatatgatttaaataatataattaaggggtacaataataatcttccttaactaattttaattaaggagttaatagcctttcaagggcctaattaacccctaattaaagggaattatcctccaacaaaagtaatctaagggttccttggtgacaagatgttgaagtgtgagtattgttttgagggttctgcagttttacggagatccttttcaggtcttccatcgtgtaaaaactgctttatagaatcctttgaaaatgatatttacgagtatattatgagagataaactcatatcttccggcgacagagtgtgtgttggtgtttctggaggtaaggattcctcggttttagctcacgtattaagtaaaattaaggaaacatatggactggattggaatttataccttttaggagtagacgagggtatcaaagggtacagagatgactctttaaaagtagtcaagtcgatgcatgacaagtataaaatcgagttaaaaatcttaagttttaaggaaaggtttgggtttagcatggaccaagtggtgaaattaattggtaaaaaaggaaattgtactgtttgcggctcttttaggcgtcaaatgcttgaaattggcgctagaatttttgaagctaatgttttatgtactggtcataacgctgatgatatggcggaaactgtactactcaacctcttcagaggtgatctactcaaactcacatccaactccaatagtccctctgacactactgttgacaatacatccgagagtgttaataaagttagaataagaagagtgaagcctttgaaatattcatttgagaaggagatagttttatatgctcgttacttgtcattggattacttttctacagagtgtatttactctccagaggcttacagaggacatatgcgctcatttattaagaatcttgaactcataaaccctcagattatacttaacataatccggtcaggtgataattttaagtcggatcacaggggaattggcgaagttacagggagaaattactgtcaaatctgtggaattgacagtgttaacaacatttgtaaaccctgcaaaatcgtacagcaattacatacactcaacggtatcacccctaagttgttgaacattgttatatggttaatttactgcgaaataatgaaaattgtataaaatttgaaaattgcctaaattacctaaaattactcaaaattaaataatttacataaaattaaataaaattgtgtaaaatataattattttattataattagttagaatattgttaaaataggattaatgttgttattataggattgaatggtataaatgataagagtggtaaggatgagtttgatgattctggtacatctgtgaatgagggagtagttgatttggaatctgggatagaaatgggtaaaaaagctgggaaaacaaattatatcaccaaaggcatgagaaggagagtgaaactacgatatgacggctaaagattcaatggaagttagtgataaatctatccgaatgcacctctaacagtggggatacccttgataattttaatataattttacttcttatgtacatatatatctcttcttctggcaaatgtggattttttaaaaaatgactaattcggatggaagttagtttccttacccagttatttcatttattcacgttttaaccaattagtttcaatctttcacttttttccatatttactaccgcttttatttatttacttatgtattaattttagatttaattagccttaattagttgtaacttcagattttacactaattgtccctattttggtgattggtgtaaatctaacccttgttacaagatttttatctaagtaaattaatattaaactattattcaatattatatttttttattctaacccagtaaattttatttatttattatatatcagtaaatatttctaaatattaataaatattgttaagtagtattaaatattaataaatattgttaaatagtattagataatgttaatgatggtttagtgacatcggtgagtaatcagaggaataaaatcgtactgcttggtgagcagagtgcgggtaaaacgtcgatagtgactcgatttgtgtatgatcactatatacctgcgtatgctgctactatcgggatagattttttgagtaaggtggtgactgttaaccagaagaccatgcgtctgcagttgtgggatactgccggacaggagcgcttccgctccctcatgcccagttacattcgcgactcttcttccgccatcgtagtctacgatatcaccaatcgcgaatcattcgatcgcaccagacaatggatcaaagatattaaagatagtactttccactcacttttacttaattatacacttactactataatactgtacatgtggataaaatattgtagtgagaggagataaggctgtaatagttgtggttggtaataaaacggatttattagataaacggtaattacttaattatcctgtagataaattgggttttatatttgtttagtactgtttcatttgaagaaggacaaagtttagctaatgaggtattccgttacggggatttctccttcctccggggctctagttccttagttattcattactttttctcctattggagagtcagatttacaaattttacttagttttacttattttaaatttattacaactttgttggatattgtaaatatgttgtagatgaattgtttttttcgagagacgagcgcaaagaatggagataacgtacaggagttgttcactcttgttgctactgaacttttgaaaaccatcgaacccgaacccgtcagcgataaatgtaattctccactcagttacatactctcagcattatattattacattattacaatattatactattaagagtataataatagcgtaatagtattaagtatataattgtgttgtaaattgttttagtggttgacattgatttaaagccgtcggctccgagtgagagtacgagttgtgctggtagaagtgcggcgagtttcacaagtttatcaaaagtttgtagccgcaactgactttgttttattatttttaattttttccaacagaatctcattaaatggtacataaagtagttatattcatgattatatgttgtaattgtgtaaagtatgtggaaggctcttttctgggcctaaatcgcaccggaaaacccgttagtaagatggcatttctgtataatagtaatagaaacacgataaaattaaataaaacacaaattttcgcgccctttaaaaaaagatccgacacacctccttcagtctcgacattatttgcagagtatcaagggaatctgccagaagataaagataaaagaggatataaagaagtgttcaaagatgctataggggtctttaaacttaaaactaaagtatcgccactagtttctctcatttcagtttccggctacttaatacctttcatggttgccacaagggtataccaatacttacactagtactattattattactgttataaagagttaacattagttatatttaacaattttaaggaataactctgtaaaaatgtgtagaattatgagtttttattattgtcattgtcgttgcctaagtttgtggatgacattgtgacttcactgtcgagtttacacaagtttatctcatccataccgaatctgatggaagtgattcacttgtgtattaataaagttttcatttcaagaaacgaactcgtccaaaatcatttcatcaaattcaattacacacaagtaacaaacccagttacttatatatcattgtataatgtgtgaataatggatttagggacatatattatcattgtatggaaatttattatgtcatgtatactctgatttcataagtagtcttgggcaagggtttttaggctcagtaataggctatacaatgttactgtcaactttcaccccgttgctttattgcatgttttgtgcccttttgggaacttattcacaactcccactggtctcacaagccgcccaagtcagtgtaggatcagacaaaatgctcacaatataattttatacataaaatatatttaactatataacttagtaaatatgcataatattgagtaaaagtgtataatagtatgagtaagtgtataatagtgagtgtaagagattaaactttgaaggctctggaatgacgacgccctcttgccttttcgaattttcttccctttgatctgacgtagggtttaggattacccttgacttcatttctaaagtgttttacagcttccctagccttagttgcacctcttaaaagagtacatcttgaacccgtgggactcctggcaaccagctgatcaaaggttaaaacttcaccgccactggctaaaatacgtttccttgctgtctcagtaacccttaaagcacaaacactcaatttcggcaccacgtccattctctcatcatctaatcaataattatacaaatattattattattgtgtaaaaaataagttaagagtaaatgattattgtatgtcagaagttcctagtctccaagaaatagtcagaagaccgtcgtgaaggcaatatttcatcatcaaatatatttaactgccaaaaatagataatttagtgtataaatagttgatagtgattggtggtgacgcattacttgtaacagttccaacgacaacagctgtgttatcgggtcttttttccatatgtttactgagtttagaaagagaaagaggagctttgaaacgtctgggcattaaaagacgttttagaacaaccttgttaaaggagtggtcagtgcgtctagagaggaatttgtaaagcttaaccaaaagacgaaggtaaggattcttactaaccaaagccttacggcctggtttcttcactctaccagcctttactaaatcaataccctacaaattatttataaactctaaataaaataatatattataaatattaaataattagggataaaaaataccatttcggaattaaaaaatgataataattaatgatttcaaaaattataataattcatggaatccccaccatggggaatcaaaacggttataatataattgttatccaattgacttttaagattagattaaaattgtcatttacatttatataacttgtgagtttacaaaattatgaattgtaatttgagaagctatcaaaattgagtgattttttgggttttccaatttttcactcagattcttttatatatttcttttattttatttaaattattcagattttattctttaaaacaatttttattaatattttagccaaataatatttatctgataatattattatatattactaattattacttattaatataaaattgtgtgtgtggtaaagaggatagattaagtatttgctaagatttgccgataagtaaaactgttgtaaagataattaaaagaagctccaaaccaatcctctacacctaaatcgcaacctcaaactcaagctaatcaatcgcaatcacaatcaaatccacctaaagcaacaagtactagtcctactccaggaactcagccatctcaagcaacaccaagtcaatccaatagtcagccagcaaaaactgcatcgcaacaacaatcaagtgcatctgcaactaatgtaacgagttctgttacaggtcaagccagcggaactcctgtatcaagtggttctaccaaacaagttacccttgatatagagaacaaactgtccacaacagaggtcgattatgccaagaatggtaaatatcctacatatacagcgaagtctggctgtggatttaacaaaattgtgaagaaaacagaagtcatttgggaatccaaagatgtctgtggaacaatagtagctactaagggcaatgataatgttgcaatatttcttgagactggtggatgtatagtactcaaaaagtctagtggtaaatggaatgatatatccagtcagaagcatgatataacgagacttaaattctatggtgaaaatgataatgagatcacttcatctaattacaaggttaaagtcctagggtattcaagcagttttgccttcatttacgagttcagcgaagttaaatgcctgaaaatcaaatttggagataatgatctatggaaacatacggacgacgatgagtacaaggatattactatgtttcaatttgatcctattaaaaacgagctatatgtcgctaagaacaaaaataagtataagaaaatagattataaagggccgctagctccacctgctagtcaaccaggggctaccactgcaggtacaactcaagctcaaccaaagggagctacaactactcctcaggctcaagctccggctactcctgctgtagaggctcctaaggtagctccttctagccgacccgtaacacttaatatcagtgggaaggccagtactgaagactacgattttaccaccgatcataacaggaatattaagatttacaccgccaagggtagttcaatgtttaacaaggtcgtcaaggatgatacagttatttggacgaccaatgacagtactaagtatgtcactaaggttttcactgatggtatcggtgcttgtgccagtaccaaaaatgtgaccatatatctgtttaacggtcatatagaacattattggaagtcagacggtggatggcagaaggcttctaacaaaatatgccttgacctaggtaagacctctagtaccattgggtttgactttcatcatgatggtgaaaaaaggacattcactgcaaaacctggatacctattcaactccgtcatcctcagtggatgtatgtctggtaatactttttggcaaggaggaactgacgaacggtgttcaaggaaggtggtggtctatggtgtcgagtcaagtattaaaaacgttaacgtatttttggaaaatgaaagagttatacacgcccataaggttggcaggaattggatctcatcaactggctttactcttgatatcggtaaaaattcgaataatgacctgtttgactatagatcgactaggggatttggtcactttaatcctaaggccaatttgtcaatcactaacattgtcaagaaagagcttaagatatggtctgcgaaagatagggactatggcctcaaagtagtcttaatgggctctggcaaggatgtgaaacatatgtcaattctgttggagagtggaaagtttgtgctccttaccaagagcggtcagaataagccttggcaagacgtcactcaaaataaacataacttctctggggtaaggatgttctctctagatgagggtacatcaaagtaccatcaactgactaaggaagattatgaacctatagttttcgagtgtagatatggttatgagttcaaaaatgatgtcaggtgtgtgatgatcaccaatatggatatggtactgtggagccacaccgaagacacggagtttggttatcctaagggattctatctcgatcttcgtcaaaacaagttcagtgtcacaagtcttaaagatcagacaaaggaagtaactcccacaaaaataagtgccgcaatttctgttgctactcctgtagttaaagttccagttgctgaaccagtgaaagctcctgtagctaaagaagcaatagtgacccctaaagcaactcttgtagcaggtccaccaattgttaagttatattccagtaaaccaggggaactcacatgtaaagttgagaaagagtttgacgattttgattattatttgcaggatcttaaatgtgaattgattacacatgacggaaactgtgtttggaaacatgaaactggtaaaccctacccaaggtatatgagctacaacgaggaggactgtaaaatagttgtaagtttcgaaaaggagtactatacgtgtaccatccaagatagtaagtggaaatcagtgatacgtagtcaagacggtatgactggtggtattggcccatcatacgcatttggtgatacctctaccttaactaaatcttattcaattatttcaactggagacactactaaaccaactgaggctaagacagtcgccgctccagcagtaactgctccacccacacccactgaacctaccaaggtggctctggacattgagaagaaacagaccaccaccgagtatgactacaaggatgagaacggagtggtcacatacagtcccagggataaccgtgtgttcaataaggttaatgagggcgattatgaaatttggaaatctgctgctgatgtatttggtaagctggtaaggactaaggaaaccaagggtgtcaattaccttgtagtattactgaacaataggacattcagtttgttccaagagggagaaaatgagtggaaggatatcaccaaagagagacatgacgtgaccaagcttaagttctacggagaaggtgacacagtgctgaaggagacagactacgatgtaactatagttgacatgtcatttagtcatacatttaaaactggtgtaaaatgtaagaaagttacgctgggtcaagtggttgtctggaaatcaggtgacgatccaaagtttcctactatagcagcattttcactaggtcttgcttcaaactgtttcttcattaagaacccctctggtgaagtcaagaagatagaacccaaaccagtagtaaaagaggaagcggttactaaagtgactgcggctccggttgccaaaggagaacccactccaattactactgttagcaagtccatcaatctcgatattaaggccactgagggtacaaatcagtttgacttcaatgaggataataatgttaagaccttcagtgggaaggacgactgtgtgtttgacaaggtttcagagggtaatactttggtttgggattgtaaggatggtgtgtctggtactatggtcaggagtaagaaattcactaacggtgacatattcttggtcatactactggaggatgatatgttccagctgttccaaaaactcgctggcaaaaaatggtctgatgttactgccgatagatttgatttgaagaagttgaagttctttggtgaaagtgatactgaactaaagtcatcagattataaggtaaatttggctttcctatcgtatgaattcatatttaacacgggtgtcaaatgcaagactgtaaagttgggagatgacgtggtatggaaacacagtgaggatccgaagttcgaggagatcaaggcgtttacacttggtcttaccacaaataagttctttgtgaagaacaagaatgatgaagtcaagaagatagaatatgaggctaagactaaagaagaggttaaggggacagttaaagccgaagaacctaaaccagtagcagaacctgcaaagcctgtcgataaagaacctgctaaggaggtaactgagactatcaaacctgctacagctcaagtaacaactgctgtaacaactcaacctacaacaacttctgttgttaaagaggctcccaaaccagctgtgcctgaagaacctttatcagatcgtactgaaaagtccatcgaccttgacattgataagactcagggtactgataaaattgagtactcaaagagccagagtggtaacattcatagtttcactcccaagggagatcacttgttcattaaaattacccagggaaacgatgttctttgggagtcaagaagtaatttgtttggaaccaaggttatatttattagtgagggtaacaagaattacgtaggtatcatacttgataacggtggattggtactatttaacaagttcgctgggaagtgggacgatatcactaataccaaatatgatgtgatgaaactgaaattctatgacgataaagagaaggaactcacgtcctcgagttacgaggttgccctagttgactactcttacaggattatattcaacagaaatgttaagtgtaagaaggtgaagtatggaaacgacgatgtttggaaaagtactgatgataccaaatttaaagaaatcaaaatgtttgatcttgattttgtttctaacagttttgtggccgttaaggataaaaataaatctaagaaactagattttaaaccaactcccacaactacaactcctcctgctacgcaaacacccacaactactgctgctactacaacaactacaacttctcctgttacaactacaacacctccagctacaacgactgctacaacacctgtaacaactggtactaccaaaggggttacccttgacattgccacgactcagagtaccaatgattgcgactactgcaagagtggtagctatccaacatatacagcgaaatctgggtgtggattcaacaaaattgtgaagaaaacagaagtcatttgggaatccaaaaatgtgcttggaaccatagtggctactaagggtaatgataatgttgcaatatttctggatagcggtggttgtttagtactcaaaaagtctagtggtaagtggaatgatatatccagtcagaagcatgatatatctaaagtaaagctctttggtgacaacgatgtagagataaagagagccgattacaaggttaaagtcctagggtattcaagcagttttgccttcatttatgagcttaatcaaggagttaagtgtaagaaagtgaaacttgggagcaaagaaatctggaaacaaagtgatcatcctgactatgatgttaccatgttccagtttgatcctattaagaacgagctttatgttgccaagaccaaagattcatacaagaaactaagcgtttaacccgtaactccagttacaaaacaaagtgaaccagtcaatgaggtagtagaaccagtaacctaacaagcagaaccagtcaatgaggtactagaaccagttaccaaagctgtagctccagtcactgaacctgttgtgtctggtcaagttacttctgtattccatagttatctgagattgtgtaagtctgatcctgttgatcctagtaagtctgttcctatggagtgtgaggttcttgagtatcccaatgctgactgtttgttatatttgttaggtagtgagtgttctcagttgttgtttgataataagtgtgtgtggaattatatgtctggtccatatcctacgtctttatactttaagtcttctggtcctcttctatatctcaactttgatccatactattatttatatgtgtatgatggtaaaagctgggtcctcaagactgatctttcccatcgtccttccactaagttagatcccgaaagaaaagatatttggcgagtcagttaagctggttgattggcgctaagactggagtaactccttaagggtcttctcattctgaacgccagtactattaccagcgtctttcagtttggtggccagttttctgagtcatgtggtaggaccgttaccagttttctccttcagtaacctgtcattctgtggtactttgatcgcattaaccaatactcattaggatatttttatacatattaactgtataatattaactatataggaaagagatagtagacaaataaaagtaaacgtataccagattaaagtgatagtgatggccttttagttgaaaaaagttttctatcctttctttcaacgtgtggcatgggtttaaggatcgggaattttagctttttcccgtgcatctgggttactttgggtttcttacagtcactgtcactaatctcagcaacacgaatgatttgaatacaactggcacgagcacgatgacggcctgccatgtcaccatacatctgagaaactgccccagtccttgtcaagtctcgatattccttatacatattatgagtacctgtccttgacttataacgaagtaatacaccgaaatttttaacttgtccttttttaggctcatttaatctgttgcaagctaaaatttcacctccagacctcttggccttgtttaggcgtttcataaaataccaaaaacgtgattttgcaaggactgaatttttagcaaaaacgctcattctgtaggtatttgggtttgggttcttcttagttggagcggctctgccaactatatgatactgtaccaaattctgacccaatgaaggtttcaatgacgaattcatcttcttactcattttatccattaattaattatattatattatgtaataataaataaatataaaataaaataaagtaatggaatctgaataccccatcaacaataaagtagtaactttgttaataataacgccgttaacagtgttaaaaaatggtaatattaaaattattttgtgattagtgtttaaaagtaagtttattatttgaataatttcattgaagaactctaactcgtgatgacagatatttaccacactaatactatttactatattttatatataatatgtattataaatgtgttataatgggtaaaaataggtaaggtgtggtaatattgaactaaattgaataatataatataaaatgtgtaatttgttattttttatcagattattaaatttcaacataataattcaattgttatagtttaaattaatgattgtggttcaatggataattatgtgctaggtattgaatttgagtgtaaatttgttacaatatgtattgggcttggtattgtgtggtttaaggattctttaagtaaatctttacctttattttatttattgaaatttgtttaacattttcgaattttatttataaaacttcctcatagtagagtcgaattgtgatgtcgtctttaattaatggtttgggccgttctttggttttaagaggtggaatttcaaccttttcaggccttagaggtctgtctcaagttccttccgctcacaccgcaacgaaaggtcttattactcatataaatacacccgcaagaacccaaagctttaggcgcttatctgtttttgaacccactctcagacagaattatgcactcaattttaataaaaccgtaacattctagttattataatattttacttagttatatactataataatattagttatttatattccgttgttaatatttaacacattttttatccatctacatatagtcaaatagccttaaagatgtaattagataactctatacaatatttattagggttctatgggaagtttaatgccatataataacaagtttggagtgagatatgatggaggagttgcaactttgggagctgctgtggctttgatgtcagtgggaggagtggctcagggaattggaaatttgttcgcagctcttgtctcaggaactgccagaaacccatcgattaaggaagacttgtttacttatactcttataggaatgggttttcttgagtttctagccatcgtttgtatcctcatgggcgctatcatgttatattcttaatctcatacaaatattattactgtatacttattatttacattaattattataatttttattataatttgttagtttggttgttagttgatttggatggggatctgatgttgattttattcattattttatcaattttaatctttttagcagatttattttacaaattttaagtttttaatttttgttccaacaaatttattcataatttcaatttaatatactttttgttcaatatatcattttaatgtgtaaagtaattttgttttaaaattattattaaataataatatagtaaaaatattataaattaatgagatttaatggattataagaattctaccagtggaacatattacagtttggaggttttgactgagatattcaagaatgaggacgtttctttgactattcagtcatacccggaagaagttgcaagacgtgcagatgatgaaattcagatgttactccagaacttttctagagtgtcaaagaagtatgagaacacacgtctgtttgatgaacataacacacaacttctgttcaaatataaattattatcagattattacgcattaatgtacatttacgcttcgaagaatttgcatagttacaaggtatatcgcaagaatctgattgatgaaatcgcagcaagttataatgggtattacgacttcatacccgaaagtgttattaataacctctcagacgttgagttatcgcatattagagaacgctgcgctaagattcgaagcagtcttagagtagttgatgatgggaagttcagtttaattgcaatcctaaaggacattgtctgtgatgatctttgtgtgccaaactccacaaaccttaaattctatcagaaaaatacacaaatgattgttccaagtcacatgattgaaattcttaaaccgtgccagtggatcaaaattcttaaaattaatatctaacacatattatatactatgtacactgtgtagagtaatatgttaggagttattgttagatgggattaatgagttctttagtattggtttgtgtggattcagtagattcggtagattctgtggattctgtagatgctcgcgtgaggttatcagactcaaatttgttatgatgatgtttatgagatttcctggatagaaagttacttccgatcagcataaaacagcctaaaagtgaaaaaacagtgtgtagaatatgagattgcagaaagtgtgaaagtgttacaattgcaattcccaaaaatccaaataagaataaaaacacattcttcgtcctcttaaaattcactattagcgatatacatccaaagggaattatcaaacataactcaatctacacaatattatactattgccgtatattacattgtactaagtaaccatgtaactggtgctaattaactataaatgggtgggaaaatacaattccagcggctttttcaaattgttcgaagttgttgaaaacgtttagaagaccagagataaatactataattggtaaaagaacacagtcgatgaggcagagtacactggagtagttaatgaaaaactcaataatagaagacgagcgtttattcatcgagtctcctaaatgttattatccttcgaataaattcataacccagaacagccagaacctcatttaacccaaactcaaattattataatatttcaacgaattattataatatttgtgtagattatgataattttagtagtaaatttgaaggagtaaatattacacatgtggacacattagtgtgctaaaaaacacaataaaatataaattataaaattttaaaagaaataaaggcaattgtgtaaaattacagagttgaggaaatgtgtaaaagaataacaaaatttttaaaacaataaaaaaataaaaaataataaataaaagttaaataaaaaggaaattaagaaataaaaaggaaatgtaataaagagtaaaaaaatcttatataaatggaagtattcatatatatagggtaattgaaacagtatttaaatgagaaaggggataaatttatataatttatggataaaattgagtaataaatataaatcactttaaattctgattaaaatttgaaaatgtatttggatattaaattttattgaaaattatgaatgcaacccaaattgatcaagcccatggggttatagaattatttcaaatcaacagtttcactaataattttaatcttctcagtgtagtttttttattaataatctgggtttttactagcaatcttatattataattattttcccgtaaatatctttttgtctattagaatctttttgcaacattatcaaatatcctaaattgttacataaattttcttcatttttgataaatctattataaaaaatgacggaaggtaagattctttcctaaagcctaaattatcccaattatttaactatttacctaaatatctacaaagttattagcataatatatattttttatttcctgattaattaacttcttagaagatggtgaaatttacactgattcaagtggttccagtgatgacgaaactatcagtgcgttattatcaactaaaagcaccaataccaatgtcaccaaggatgtaaaaaaggaagaatcaagtgaggcacctaaaaagacaaataaacctgaggaagctaaacctgaaactaaagttgccaaacttgaaaaaaaatctgactcggacgacgagtcttcagatgactcagactctgaaagtgatgtgaaggagctcaagtctgaggatttggaaattaaagttgagaaaccagttgcttcaaatgcaaaattagttcccagctcaaaagatacaagcgagaaacctcaatcgccaaaaaggaaaaggaatacccccaaaacctctcccagtgccaaggatgtgaaacaggagaaaatggatgaatctgataagaaatcacccaagaagagtaaatccaaggagaggaaacctaagaaagatgaatcgaaggaagatgaatcagaaccgaaacctaaaaaaccgagaaaaccaaaaactaaaactgaaaaaactaatgagggtaaagatgaagtattgacgaggttgagtaatgatcaggtatttaagtcattgaaggataagatggatgacttaccattgggtgaattgaaggacaaattacttgcaaaatcaccttctgaatcttccactgactcaactttatccaacgattcagatgaagaaagcaattcagataatgaagcaccacttactcaaccggaaaaatcaccaaaaagtactaaacctactaaacaggatagtgatgaggaagttgaggaagtgaaggagaaaaggtcagataaaatgaatggtgtcaagtctggagaccaatttattaacaaagagagacttaaaacaacattcaaaaccaaatttgatgttcccgaaggtactgtttataatattaatacgagctattcatacaccacatagttatacaaattatacatctgttagaaatgtttgggaatgttatgattataaattacttttatgattctcctgattatatctagagtgaagctatgaacttcccaattctcaacctatatactgatgtagttagttatactattagttttagtgtggttaaccctacttactaaaactcaacaaattataggatgtgagatattctgcggaaatataccagtggaatcaacagaggacgagatacgtgagttgtttgaagaatgcggaaagataacaagagtaaacaagctaaaccgtaaaggagtggcgtttataacgttttcaaacgaagaatccgcaaagaaggcattggattataacaattcaccctacaagggacagaatttgagtattagaattacggttaaaaaaggtccgagaactcaaaagtttggttcaaaccgtaaatctaactattcgtcctctagttcattcggatcttcaggttcaggttttggacaaaaatacgtttccagagaggctacgaacgagatttgtatcagaaatttgaacttcaatagcagtgaagagggtttgagagagttgttcagcgagtgcggtcaagtgacgagatgttatatgccaaagtttcacgactctggaaaaccgatgggaacggcatttatatcctttacaactgtagaggcagccaaaagagcagtagaatatgataacacagatattgacggtaggacagtttcaatccagtatgcactgccaagagacccaagaagctcaagaggtagggcaaccaagggtagattcaccactggagtgaataaatcaggaacctttgcacgctcgtttggacaaaaaaagtccacaaacgatgactcaaatcacgtaaacggtgctctaaacgaatcctctgaacaggaaaacaaacccaagtccatcatattcgacgatgaggatgatgaataatctggtttacatatactatacataaatatgctatttatatattatatgttgtatatagtatagttaaaagtggagatttatgaaatggagctaggaatttgaaaataatgcttaactacatttagcaaatagtaaatagtttaaaaatagttacccacaagaatgattctaatttgagggaaatgtgcgtaacttcaaaaattgcagtataacccaggttatacaatttggaaatgatattttgaataatttttaagctttaattaactaattctagcacctaattcgggacccagaatagtgtaaattcttggtagttggtagtgtattcctatggattctctggaaatcgtcaagaaaacatgctattcgccgttaggagttaaagcgtaagactaaaatccattcatgaatttttagaagagcagctcaagtcggatactttgaagacgagtttattgataaatttacagagcctgtggaaaagtcaaatttccttaatatccgttagttttcttccttaatcttgttttagttcatgtggttcgagttaatgcatttcggagcgttttggacaagttcgttgaatcttttccgggccaaactgtccaatgtgttaatcttggcgctggatttgataccacggcattttggttgatccgtaaatacaacaatgttgtgtgttttgacactgatttcgatgaccaaatgaaggccaaatctaaggttatggttgaaaatgaagttttcaaggaacttctacccgatctcaagctggtagatggattcgttacttcaaataaatataaaattgtaccaacctacaccatataaaattgactaaattcagtaaatttgattaggtgccatttgacttatcgaatgttaatgaatttaagaaccttgttgattcgggactatctccaaagtaaacattctgttattataagtatgctttagatatccaacgttgtatttggctgaatttgtctttttatacgtaaaatctgaagttgtaaaagaggtgattttataaattacacatgaaaatcgtatagtttgttgaccatttgtatgatttttcaagtgaagattctgctcttatgctttcagaatcggtgagtccaaattttgatatcttttttagatgtttgtccccagtgaagttgcaaaatattacgttaaaatcatcggggtttgtaataacacaatataaagttcagagtttagggagaaaagtctatggcccaatggagtatccaagcgtagaatcacaaatccaaaggtatcaactaacaccacttacatagtgcaatgagtgtttagatatagtaagcgttggaatgttaaaatggtttgctataatgagttctacaacatgaacacttcagaggaggagaaaaagagaattatagtaatataacacatgtgattattgatttttaggaattggaagactttaagaatatgagagaattgggagcctcgttctcacactttatgttcggcctgttatataaggaatatcataagttgcctggtgttgtagagctctttactgttaaggaaaactatgattacgagtccaaggctccttactttatccccttcggcgttaactttgatcctaacactgaagtcgactttcagtatttcaaaactgtctgctttgataaaatcccacgagatgaccccgaatctcaaaccattgaatacgatactaactaattttatagtactactataaaccaggaatactatcagtaatgaattaatattactatcagtaatgaattaatattactatcagtaatgaattaatattgctgtcagtaatatactatataaatactatattatatacagttataaaattataatatacttaatatcaagtataatatattaatgagaactataatttaggtttgagtttgattttctggtatcgtttaggaggatcggtatgcatcttccgtttagagcagggagtgtcatagtaaatggtagaagtttgttcgagatagttgatgtggataggtggaggtatgtccatgaccctgtaaatctcgcccctcacttttacaaactcgtggtccttcagaatatcctcaggaacagtgcaacttgtgctcgaaaactcccggttctcgttcaaactctttgaacaaatactaacacggtcatttatctcataacttaatttcttcaattcaatgcaactcaactttacactgtttacaatattagtggtattattatctgagtgtttattagcatcaacagaattatccacattattatcattagcaacagtagtgatagagttatccatggtattaacagtagtagtaaaaagagaatccaaattataaatggattcactgtttaaattaaaggaggacatagcagtggaattatcggaggaatttgaagaattggacaaaatgttaaccggagataaaatgtaagttttaaagctgtaggaaggtcttgagacctggattttaccattatcacagttggctttagtgtagttagttaagtttgcaatactgttaacgagaataaggtcgcctttgaagacagtgtattctttatcaaataagagaaagttagtataccaagattcacactggccatatctggtgccaaagtgttctccaggcctaatttcaacgtcaatcccgactaaaagaccggccaaactaccatatgtagaaacagagaacaaattaaggtaatgttggcacatttgaggtagcatccattcctctaaatttaagtgctccaatggtaaccactggtcacaaatgggcaaattatcaattctcattcccaccgactggagcatcatcttgctaggtgaaaagattgtcatttcagagtctgaacttgacttgttaaggatattactggagtcaggaaagaaagatgggacaaataaggttgaaaccctgcatgggatactcttgacggagttgacaaaccttttattctcaaagagaattctcctttggaaatctagaaacacatcagcgactccttcctgacttgcgaaatcgcctaaaatctcactaattaccatgtcataaggtggagttgagggtagtacaaggtcctcaccaaacctgtgatcccaaccaaagtactcgttctggtcaaaaataaacagctttgaatgagtattaaaaactctaatcacattatcgaaaccataagcagccatgagtttccctgcgagcctagaagcgtgaacagaaacctccaaagcatccacaaccctcgcaccagcctttaatgcattcattgccaacacacacattggacctgttccaatctcaagtattctcttaccactacaataataattattcagactactgttattattgggattaattaagtttaagcttgatacaacattttcaacagaatcaacagtgttgtcactaatatcaatagtgttagttgtggtgaatgagtttaggtcaagtgattcgtagctgctatctacaaaaacagtttcgttatcgtcaatttgagaatcattatcacttgtagtgcttgtggttgtactctcctcagtgttcacgagatcaacactattagccttgttaatacaatcctcaacggtattgttattaacaatattatccacagtattaggattagaatgaccggtccagaagattgcggccctataataatggactcggtctgtatcggcgaccatagcttcgtggttttgaagtgcaaactgaccacatattgagagagtattcggctccttatggcgaaactcagtggcgtcagcaatcttctttgagatgaagtactcgatcttttctgacaatccaaagttgtcaggccaggtaggcctcctgtggtcattcaaatcactttcatagccgttacgtaaacggcgactcaaactatttctgagattcctcatccttactcctatatcttccacatgttccggattctctacagtgcttttagtgctgttattatcattgcttttattaacattattcccagtattggcattttgaccagaattacgattatcaacaattttattagagcgtttggtcgtgataacagaattctttgctgatttaacagtattattactgactttattaacagtagtaggagtgttactttgagtttgacgggatactttattttcgtcgtagtttaagggagtattccgggagcgcatttgatatccgccatagagccaagtgaggtgacgaatcagcttcagatcctcctcggaaatgtcttcaggcccatctttgggggcagaagaactagaattagaagatgagggtctcattaaaatgaaaatttacttcatgcgattaccccggatatgccattcatgtcaatcttatagattttacaaaattacctttaaataataaaatttagctgaaataatgctaatagaagtttgaattatactttaacaacgctatatgtttaaaattacttcaaacgagttaaaaattgaaaaaattaaagttaagttaaaattaggaaattaattaaatacaataaaaaggttaaaaaatgaagaaaaaggtgcaataaggttgtaaaattgagaagtctgatgtcgtgtagagggatggaattataccaaattattattgcttaagcagagacaagcatttaaaaagtgtaaaaactcagatgaaacataagtttctgaattatttgttgagttgtgaggtttggaaacactccatctaaaaatgtcaagaggtattaaaaaattattcttttcgcaaatagttgaaatcgtatctccatcacttatttttatccaatcttcaataatcttacaacaccttcccaaaagaattataaaatcggtgaaacacacaccctcagtaccctttgccacctcagcaaacagcttgtttatcatttttttactttccaatttacttttaacttcatctgtattatcagtatcattaatgttgttattattatcctgagttttgacggtgaatactgtgataatatttgtgattcctgtaaatttgcaaaatttcctccaatcccttttagttatacacttttttgccaaatttccaccttttgctcttttaaacaattttattattaatgctaattcaggtttaaataaattggtattgatttcatcccagtcttcaaacttataactatttttatcatattctgaatcaccatttaaggttatattgacaattttaagtgcttctgtgattagaggcacttttatcatcaagtctacttcatcatctttaaacccttttccatcaaaatagctcgttttcaaactaggacaacagttaacttccaatagccaaacacgcccataaacatcaatcattacatctaacccaaatatttgaaagttatcaattttatcattcattttaaaatttacttgaccatttcctggtgtattcatatgtgtggtcatttgtgtgttgagatacatatctgggtaaatggtttgtatggtgatggatccgatgttcataatttgtgaccagatattttgttcattatatccttccaactcaagactttttagaactgattttagtggtcttttactgttattttcatcctctggatctcctctatgatactttgcaacatttgctttgtttatattgtagttagttaagtgaatgaaattgttattactattaattattgagggatattcatagttttcagtgcaaaatctaaccaaagaattcttgaatataaaacctttaattcctgggtaactagtactaactttatcacattttccagacccaatcagtaataggtatagacgaatgtcaaattttttaccccttattaaaagtggtattgaaacatattcctgagcagtatagtccaccaacatctcctcactaatgtcctcgggaacagttacgaccctaacaccctggcccattgaaccatttgaaggtttaaatatcaatggaacattattttcaactaactttagtacttttttaaaatcatccggtaacctataactcctcggccaatatcttacattactatcatgtgagttattagtatcattaccactattggaattatcaatagtagtattaagtagtttgtgtcttgagtaaacttctaataaatcgtagaaattgctttttttagtaatttcttgaattcccggaaacctgttaacggcgattttagaataagttacacgtttattgttggaaatgagttcatgaagttgttgagaagtgactgagtaaccaagccagtaaatgtccccaatattataattattacttttccatctaagagactttaaacacagtgttaaaagggagaaatcactcctagattctgaaagatttataactggcttcccaaggtaacctcttccatttaaactttttgcctttgagctcttctgagtatcggttttagattttgaccctgaatcagatttaacacaccgttcctttaatttacttatttgattaagcctaagttttagaagtctatctaaactattttcatttttaatcctacaacattcccttaaggtactgaattttacagattcttcaagtttatttaagtttttacttggatttattttaccatttgacctttcaggaattttagataaaaggcctaaaatctcatttatgtaatttagagcttctgaatcatcattttgagtctcaagagatatagtctcaaattcatgtgaatcagtacttctagtagaatcttgggatatatgatcagttaaaacagttgatttagttttaaaatttctaaaatccttttctggaaaatatccactagatgtgtaagacccttgtgaattgtttttaattttttctccgtttttccaatcgccactatgttcgaaaaaattcatttattttcaacactatttagtactattattaactattatgatagtattagtatatagagtatatcaactttaattatttgccactttctaacatgattcagaggattcctcataaatcctttttcaacacactaggatgtatgtaaattgtagaaaataacttcaggtttccaaattgtggattatggactatttaagggataaatccttaagacgactagatgattttttagaaaaattaaacaactttattcttcaaaatgacgatgataaccaattgagtcaagagaatacatctgaatatgtaccatatttgattgtaaagtatgtgatttccatctgcaatggagaagattttgaacctagttctgattcctctaatgaaaaaattgaggagtcttatgagagtcaaaaactcgttgaatttgactgtaatgaattttacacctcccgaatgagcctagttttgaagaattttacatcttctaacctttctcttgaaacttttttcgacaacaactctcaattctactgccatacctccagtagtagtactaataacactgataagtcaaacaactcagttaatcctgtatcatacgttatttattcaaaaaaagaagtttcaggattattaaaatctggtcattgtaaacttgcagttgatttaataggtgatgttccattaagtgataagggtgttggaattaactatttaaaacatgggaaactagttttgaaaaggtttacttttttacttaatcgcgtttgtccgctgagaccagagcttcatattaactacattaaatctcatttatcgcaagacaaggaaatgctgaagatgattgatcttgcatacctagactcctcaaggccctggatcatgtactggtcactacactcactactattacttcgccatgatatacaatcttacaaacaaaggtttcttaataatatatagcagtagttagtgtatataatagcattagaatagtatatatatatataatacccctatttgtgatgaaaaatgtaatagaagtctgaatagtataatgaagtgttgggataatgagtttggaggatttggtggaggcgagtatcagagagctcacgtggcaacaacctatgcagctctgtgtgttttaaagatgtttaactctgttcacatggttgatgtagagttgttgtactcctttttgatggatatgaaatcttcggatgggtcgttttcagccacatacggaggtgaacgtgataccaggagtacttactgtgccatagcaagtgcttatatggccggaaatttaactgaagaacttactgagaatacgctagagtatattattagctgtcagacctatgaaggcggattatcatctgaaccttatttagaagctcatgcaggttatacttactgtggtctagcctgtattgctatcattatcaccaatacccttaacactggtaattataacactggtgatagtagtgatacagttagtaatgtgaagaataagttagatttaatgaaagtgtatgaatggtgtgttaatagactgacacctcaattcggatttcaaggtagacctcataaacttgttgattcatgctattctttttgggtaggatcatcaatacttattattgaacaactatttaatcaacttgataaattttacggtcaaaatgatacgacattttataatcgaggtgatagaaaattgtatgaagaacttttgaagtgttatctattggtggttgctcagactggtaagggatttcgagataagcctggcaaaccttcagatctttaccacacctgctactcactctcatatcttaacctaattgacaacaatctgccacatgacattttactcaatcttaccacttaatgttataatagtgtatattatgtatagtatgagtatattagtttttgttaattttgttgatcagagattcgtgcaagaaacattaaattctgatgaagtcttgtgatgttcctataaatatataattggctcaataagaatagattgttggtagataaataacagttgagattagaactaacgacatgatttctgaatcatcaagcgaatctgaatcatttatagttgttaaaatggagaaattctgattaagaattgagtcaacatgttccgaattgattttgggaggcctgtcgttgaatttgttcctaagctccttaggctcaggaatagtggaaaaattggaagattgagaaccatattcacgcttcagattgggaatatgatcacgcggttcctgacttttagtgtcaagattttggaatccaggtttaagaccttccggttgattttgtgtaggtgactgcctaacagggcgagcgtaccgatgtgattgaacctggctcccaggattctgagaactcatataagggtaattaggatcagggtttcccctcctactcattatgtaaccgtaaatattcgcatttttaaataaaattactttttaaaaacagattattcacaacaatcacataatttacaaaaacaaagataaaataagaatgaattgaagataaattaatgataattaaaaaatatatttgtgaagaaaattaaaactggcatttgttttacactattttaaattttaaccacaatttacaataatttacaaagtttacaacaattctcaaaaactgtgtaaataattaaaaaacaccatcttctaacttgattattgaattttaaagcaatttgtgtggaaaagtataaatctcaagtttcaacttcttaatggatattatgcctgaatattactgatgatggaggttgagaggttgagttcaaggaactcatcaaggcttagagagtcatttttatcagtatctgatatgataaactcatctataatcttatcgtatagtgtgttttgagactttagaaggtgaacgaattgtagttcacggtctttttctaggccagatttgccatagctatcaactgcactaatgacgtcattaacgaaatcgttcatatcaattgaaccctttgtaaactcctcaaaagagacctcaccatcattgtcgaaatcgaaggaaataaactttcctaaagccgtcagtgattccctcagcttccccttcatcaactctatcccacttcctttgacaacatttgattgagtaagattagttaggattaagttgtgtaagaatttgactgtgaattttactcccaaatttccaacattaaaaagtctctttttaatctccaaatttatgaaaaacgagcctaacctacgggtgataaaatccacaaaaactcgtgaatccaaatcatcaaactcatttaacaagctgttattcttcttatccttggaatttttcattgaggaattcggtttatcccagtgattagtcatatctgagtatgaagactcgatgatgccatcgtagagcttgaaattatcaaaggaatatgttaaaagaagttgtaaagcgctgaggaaaacgctaaggaaggtgaatctgttaatttcaggctcgagtgaggagaagtttatccctccaaatccaatttttcgcatgtgtaaaagggcggccgaggactcgggaaatgacaaaaataacctatgaacggactcctgaattgtgccgaaactctcagcaattagactcggaaacgctgtttcaaccagtaacctaaacgggtcatcactagatgataaaatatcactcgtcaccagtagatttaacccaccactggatcctactcgttttctatcacaccccgatctaccttttgatttcatatccccatctttaatagtgtttgtagtagtattattgttactggtattattagtgttaatggtgatatgatcgtgatatgatgagattgagtttaaaactttgtacatgatttcatttttgtttaaagagtgtgaaagaagtttaacgtgcttgagtttcccagagtaaggaagtttccttagaagtgatgatacatttagccataaaactaattctctatcatactgaacattagtaccaacatgaccatttctatgattttgttggattaaatctgaattttcaagtgaatctgaaattataggacaaagatcatccagaagcctaattttaggcttgttttctcgagttttataatcactgcacattttcaatattaagtatagtgaagaaggagtggaagaatctgtgttaattaccacattatcagtctgttttgtggttgaaattactacaggtaggctgatttcgcccgaatcccgagtctctttccccctaaaaaacatcagctcatcttctaggggaactgccggacaaactatcctgcccagtccatccatgctctcattgttacaaatcccgttataaataaacttcgatactcttaactcgtttagctttagtacatttgagaaccaaaatagcaggaacagaaccagtggagttagaacccgagccgccagacccagcgatttcgataactttttaaacgatatcatatagatattacttttacaacattagagcttttttataacatttctttcctatactataacttatagtactagttatagtattattatactacaagaccattatattattattatgttaataactatatcatattattagcattggtatagttaaggatgtgtaataagtttgaggtgatggataaaggagttaatataggaaaagttggtttagctagatatgggatttggaatgcacttggtgcgctgtggtccagtaaaaagctgtcgttccataatttggtgatttaatttaataaaatggttttcagtaaattttaggccaaatttgcaggaattagggctgttttgtctaccatcatggcatttacacatgcgcttacacatttcagttaaaggacctcaattcaactcaaattgtaaattcaaaattaataaattatacagtaactgactgggagcagaagatgatattaggacccaaaattcagaaaattccatacacatttgatttcaaccatttatataattgataaccataaaataattatttatcataattatgtgaaaatataatagttcttggaatttttaacaataaatgaagcgaaactgataatgttaaatttatatatacaaaagaaggtttggaatcccataatataatcttccaatatagggaaaacaattttaactttacacttcattttattataccctgaaatttgtaaattcgttgtacatttttgatatataatttatttcgttgtgtattatttcctcaattttaaatttacagcctgcttttaccatatatcaaattttctcaaattatacataatatatccctaaatttaccctttaatctaagatatttttcatttattatagtccaaattggctttgttttagtatagtagacttaatgattacaactcgtttattggttgatattgtaatgatttaatgcattcgggaaactgtgactgtaaagctgaacatgagttggcaactacatttgtgtgtttgagggagtgtttggacctcccagcaataagagtctttaacagtaccacagtaagtttttatttccaaaaatattccaatgtttaggatccgaatctgggaggaatagtttttaagcgttacgacgaccgtttgagtccacccgaggttgtaagtgactcagttgaaactgagttactgtttacagtaccgttttcacaaccctgtgatgtgcataatttcttagtagtaaacgagagtgaagctgtgttagagcttaaaatctttactaataggcctgacttcgactttagcgacgttgaggccactgttccgaccctaactttatcccttcctcctgactttcacggctcattcatccataatttgaactcagtaaagttcaaaggtgttcaggatttagctctgtactttctctcaaataaaggcccggttaaactcaggtacattggccttagaggaagaccacttcagcctgtaaaaggagttgtagatgtaacttacgaagtgacaccaactgctgacttcaacgaatcgctttctgaaattcaaaacttcaaaatcatagaatagtccattaacactactgttattaaaactaacagccaggtcaagtatttttctgggtcaaatgtgttggcattgatttcgaaatagagaaatgaggataatatgtgtactaatatttgtagagataattacttgttttaataccaattccatagattataaactggcaagatttagagtttattctaagaacccaccctatgataagaaacgcagggaacagagaaggtcaaagaggctaaaacaggttctgcctgcggaaaacatagcacttgaaatgaagaatcaagctatgatttcaagagccctagtaatgcaaaaccaaatttttggtccaagactgtctcaagtacctggagatggaggtaaaatcccagacctcgaggaatctagagataaatacacccatgtcaaaaattattattcttcttattacaatacgtatattgacaaaaacgctcctagcactgtaaacaaatttaacactaccactaatactgttaatgatcttgttaatgctggtaatacgactatggctacttctgtggatactgctgatactaatgataatgatgtaaagaaggataattacggagaattttttaataacgaggcggaaactataaataaaatattaaaagacccaaatgcgacatttggtgaatttgagggtcagaaacccgctgtaaaaagacctttttataaggaatttgaagggttccacccagatagtagttatattcgtgcgactatgaaaagaagtattgcggcttacaaagacgatattgaagaagactatgaaggtacgcagtcctattgcggactgaagtacgagacattactcagccatttgacccctgagaacatggaactggtaagacaaatggaaatcgaagtaaagcaaggcgaactcagccctgataatcccattttagatttagatatcgatacgaatgatgaaatggatgatgaattttatctaaaccaatgacacataaattaacactataatttattactatactattactgtatactaaaatatatcaaaattatatcaaaattatatcaaaattatatcaaaattatgggcaaaatgtaatagaattataaaatattatttaaagttaagtgttgattttgaatggtgaaagtgttaaaaagtaaactgattcgagattagaaacagagacgatacagttaaagttgtttaaagtctcgagaatagaaaaagcaggtgagtctggcattgcagcaaacacttgaacgttatcaacagtgaatgaaggaagaggtaagctggttttaaaatcaagaatttgggaagttaaattcttttgaaacactttcaacaaggactgaagttctactttgtccctctttttaggtaatgaagatatggataaaacaggttcagggttaaagaatctcatctcggggttagaaacctcctttagaggttttgggcatttgccaaacctctgaaaagcgagataaacatgaactgtaagtaagtcagtaagcctattgttattttccaaggattgaataagtttttcaggagtaacaaaaaccttagtattattatcgacaaggacaaaatcagtccgtaaaagggcaaaaatagtctcctctaaggtcaagtataggctagaattgctgaaactccttccaagagataacctgtgaaaagttgagcctttatgatggaaaactatggaatgatcattattccaaacaccgaaagctgaaaattgtttagcaatttcaggctcaaaataatcattatgatccatttactgattaggaatttaacaaatttttatttagtgaataatttacaaagtaacatttttaaaaattaataatatattaaatattacattaaaagattggtagaatgcgataggatgtgtgaaaatttatgaagatggattggtttaaattacaagtttacatccactgtgaagttttggaatctaggccaaaaaaatgtttaataaattttaaagataaaatcgaggtcatttttaacaaaataataaaatcaggggaataaaagtaagttttaagcaaaaaggtgtaaaacctgatactttaaaactctaaccttacaattaaaactcacttttaatatctctttttacgtttcgccactttaaaacaacatctttttcgaaagtcatttgtaaaaagttcttcggtggcctttgcaaacatttgacccttcaaacgacttaaactttccttgctgattccaatcctcgaatcatccgagatttcacttgaacttttccttgtctttgaagcctctatactgtcctttttcttgtttgacattttacttactaatgtttccaggcctaattttattttttccatgtttctctcatgcttttcccttatctcatctttgtcgaacttctccttcatcacattcataaatttttcaaatttatcagtaaagtcctcctttgttagttttttctttttaacaaatttctccttttcctccttttcctcctccaaagaatcatcactatctgattctccactgtctgtttccgttttagccctatcaatcggatcaacatcttcattttcagtcacatttgttccaaaatttagtgtattctcagttaaatcaaattcatactcgttgttctctttaaccggctcagttttatcgtctttaggctcttccgccataaggaaggacccaaggtcgatatcaaccgtcggaccaattttatcttccccaggtttgccttcatttccctccaaatttatgctaaattctttgttcttttcatttgtatcggttttgtcaatatctatagtatttcttttgggaggttcgtaaactacaaaatttctggaccggtttggcactttatcatcaacatccagatccccgatgtttgtgttaaattccctcctagcgtttaaatttatgttctttttagggattaaatcgtccgtgtacgtgttaatccccctcagtatttgaatctttaactcggtcatttcaaatgcctattttaagtgcctgaacggcattttattttatattcagattttaattgtcaaaatctgtcaagatctttcatataaacttttttgccctgaaaataatggtttcaaggccatttttaaatttatttactttatttagttttaattcgcagaggtgaaattaccttagaaatttttttctcctctatttccaaccataataaataacacatttgacttaaaataaacttaaattatgtatataaacagtgataaactattagtatcacatatttagtatatgatgtggatatatattaaattttaatgcttggtgtgattgccttgttgagttcaaactcgtcaacatatgtttgaagtattttactatcgttgagtttttcctggtaagtcattttcctttggagagttactaaattattaatcatgaggtgaatttgggtgattttctttccagactcatagagcctcttcataagggcgggagtggggaaaaccttggcattatgcatgtcattaagtatctccaaggttcttttagcggatcttgaaagtattgccatgtccagagccatgcataggagtgtctttttcggttcaatttgagttttagcctgactccaaagagtgaaaaaacgcccagggtccttcatcttagggccaaccatcctaaataaaatctattaattgttaaagaacataccttaagagtatgaagtaagtcatgtaatcaggtgttatgttgaaaacttgaaaacagtttaggacgtccatggcgtattcgtagtaaccgccgttttcataaactaaaattacactatttagtaacctgaccagttttcctttatctgaatcttccggaaccaaatccttattttcactattttcagaatttaaagcattattatagttgtacagaggaagtaaagattggactattgaccaggtcttgttaatgttattgatcttttcattttcagtcagttttgacagtttcatttgggctgcaagagtcttgatgtacacattatacatctccaaagtaggctttattcccatagtacgagcttctaaaatcacctccttggccttcctcacattgccaacagtacaacaactctaatcaaatgatatattatataatatatatattcttaatactatttatataatatgtataatattgttataatttgaaacctggagtagcagaagaagtatgtgagaattgattgggtattcctgagctttgatttggttgtagaactggaaacattgatgaaagtattccttgcgatttgagagacagtttattagctcaatataggtgtaaattgtgggaaatttgttcatagttagcatctcctggtataaatttaaagccttttcagcctctctggaataactacagctcttaatcataatggtaaagaggacttcgtcaggctcaataagtcgccaagtcctcatgtaattgaaaagactccatgcgtccttgatgtgcttctcctttacaaggcagtcaattaatactgaaaaaacaaccaaatcggcttttgttccctcgttttccatcttcctatatagggaaaatgcacttgaaatatcaccagagttaacatgagtcttaatcataagagtgtatgttctcaaatcaggtgttaacaggtcagatcttaggcataaaaataagtaccgtgataactttgcgttattcgtcttcatgcaactgatgaggcagttattgtaggcctctattgaaagcggaattttaagcctcttaatctcagaaaggatttctaggcattgatcggataatcctcgcaaagctctttccttaataagcaaattcaaccgttcaggaacatcaactccactcgatacaatagagtcgacagtctcatttttatatatttctaagttagaatagcgtccattgatatcaaacacacctatatttaattacaatatttaaaacactaaccagttgaatttatagaaatgattgtatcagaagttggttcactggaatatacatctaaatcttcggatatatcacttaaaggaggttttaggggatcggaaatggaaggatctttactaatccttgaaagttgttttaagggacttataagtgaatctaaaaacggatatcaattttaaaaaaacctttagttgtacatttcgttgtccctgaaacctttgaagaatcagttaattgataattagagttagtagttggatgaatctggttggaatcccctttaaaatcgtctggtgtttgatttccttggacagatttttcattaatccaattatttccaaagtttttatcattttttaatctgaatgatgggttattgaaaggattttgggggaagtcctgtttattagaagatgtgcgtgaggacaaatctccaaaaatagactttacagtcaaaaattgcgaatttgggccggattcagagcctaaaagggtttataacgtgagtttcttaaataaaaattaaatgtataaaaattaattaggatttttgtgtaaaagttaaaaataacgccgaactaggaatcttgaggttaaatctatcatttagaattttttcatatggtagtggaatagaagttgtaggacgttttaacaatgatggaatcttcataaattaatgtgattccttatctaactactgattattgtgctatgtgcaaggtgtaaacaataaaaattgtatttttaaattccgatattttcacggatttaagttaaatttatagtttttagttgaataattattaaaagagttatattaattgtggataacattaattcctactactagtgatgtaatatgttataatacattcagaaatatttaaaattttcatattcgcaatttgaggacttcctcgttttttatcaactttgaaatagcattgaataccatttagactcttgatgtgaaattactattataaattttgaccttaaatatggtacaaatatttgcacttttgtgaattttgaatttttgagaaatgataaagtgaatggttaaatgtcaaagtttcatatcaaatatttcatttcttcgagcaaaaagtgtgttacgcttgaagttgtaaaaacccatacaattatttttaaccttgagggaaatttttttgtataaaatccatcaaataaagtttgaagaaaccgggttttgttttaaaagtttttcgaactaagttatttggtatttgaaatatcatcttccattcaagatcttgcaggctataaaagtacaatgtatcatttataagaaggcgaatgttattggatacattgttaaaagaaacatacttgggatatttgtctccgtacaatccaacatcatgtttccataccagtctgttgtcaaatcttacttcgacgcatttgacacctcgtttaaatctgtaaataactagagaaatatcatactcaacattatacttgctggtatcatttacactagttgatttatcatcattgagggtcataaccgtgaacccaggataataggttgcaaggttgtcttttgcgtttatccatttttctttgcccctttgcctgtaaaatattcgattccccttattggtgtgtattgtcacttgtttagcttgatctggaaatttaatagaagtttgagccactacttttgtggaaaactcagatggatcattagaattatcccaaataagacgggtttgctccctaacggaactgaacttataatcaaatttagctgtaaatattgtaaaatcactgtatccagtattggaacagaaatagtattcatagtcaaactgatctgtactttctccgaaagttacatccagaggaattgcagtaccagcatttaatggaaatgggagagtcatcggcgtccatatatagtatatttgtttccactctttattttctagagaggagtcaagataggaaccatcactgaacgagattctgaaatcgtgaagttccttttctactctgtaatattcatcaaaagtaaatcttagaatatacgaaatagaagtgggataaaaagaagtagttacatagttcccgtcggaactgatgtatttttcaccgtatttccaaacagtattgtttttatgtcttatctcagtacatttggaatatggactgagattaaaagtgtatgaatattcgtatagacagtgaggatttaatatataattactcgggtccaactcaacctctttaccatctttatcggttgttaatagttgaacgttttctggaaatgtaacatctttccacttggattctgttaaataccttctaaaaacctttttactaccgtcaagcataaaaatatttacagaaaccagtagtaaattctttaaactaaacactgaaacttgactggcacactcggctaatgtttttgactcccagataactactggggaaacataaggaactgaaactaccactttgtcaaagactcgacctagctttggggtgtacgaagactggcctttagcctttttatagtaaaaatcagcggtatccctttcaatgtcaaggtcaagttttactgctttaaagaatatacgttcagaaaaaagatccgttagttcagttggttctacactttgtgaaagttgttcatactctttctcattatcttctggatggtctcctgatgaatgctgatctttagaatgttcggattttcgtgtatcttgggagttatcgatagtggtatcatcagaagtttgaacaactccttctacggggtttccactagttgagtcaagacctaaatcaggtttttcaggctgtttacattccccagtggctggaccttcggaatctcctttagttatagcaccacagagccgggaaattaataaggataataaaatccattttgagactgaaagtgttctcataaaaataattagatctaaattttaatcgttgctcgaaattttgaaatcatagtcttaattatgcttttaaatttttgaaaccagctaacacagattcttacatgttttctgcatgttttttgctgttctttcaaaaggtgtgtttatgatcggaataaccctgtttaaatacaattaaattaatccataagaattaacataattcttaccactaattatattaatactctttccacttaaattttgaaccgttttaccaaagttaccttatataaaccatagatattttacaatatttaagtcaaattagttacaaaatgttagtattaaacgctttaggtgcctctggcactagaatatactcggttttgccctggatttgtgtatattgatcctgtgtttgtcgtttatcatcagaaccaggagccattgaaatatacagttggttggtataatcaacccctatgattgatcgtttacttgatcccagtgtttatctccaataaagaagtcagagtatgaaccgtcactgaaaaatactttgaacctgtgagtttccgaatacgttaagttaaattcccccaaaaaaagtcttatagtatatttaatagaagtgggatgtaaagtggaaatcttgtacaatcctccagaaatacaataagtgtaattgtacttccaaacaatatcgtttttaaatcttatctcagtgcagttagcatctgacttaaaatcaaaggtgtattcggatttatatccgatatctaattttaatgtgtaattacttggatccaactcaacttctttaccatctttgtctagtgtgtagagtttaagatctggtggaaaggtaatatccctccaagttcccatgggacgtcttccaaacacctttctaccaccgccaagaatagaaatgtcaataaaaagcatcattgaatctgtactaaaaactttaactttagtggaacactcactcggtaatttgggttcccatatgagcataggagaaacatagggaactgatatttccactttatcaaacactctacctagtttaggagtgtaagttgaccagggtacatcctttgtatagtaaaaatcataggtatccctactaacgtccaggtcaagatgtactgttttaaagattgtaggttggggaaaagaggtctttggatcatccaatgcatcaaagaattcagactcgtcgtcgtcagaatcgctaggtgttggtttgaatgttgtaactgttgatcctaaatcttgtgactgttgttcggacctttccacagtatcttctggttgcttttcagaatcttcggatttttgtgtatcttgcgagttagagccagtggcatcatcagaatttaaaacatcaccttctgtggaattttcagtgtttgattcaagattcgaatcagattgataaagcagctgatcttcattgtcggatgaaaccttagattctataccggtttgagcaccacacaccagggtaaagattaagcataataaaacccattttgagactgaaagtcttctcataaaaaataactgtatctaaatactaatcattagaaattttctaaatcacatccttagttatgggattatacattcataagctacaaattccaattcttacatgtttactgcatgttgcttagtattatttaaaatgtgtgactataatcaataagttcttgtttaaagtcatttaaattaatctctagaaattagcataactccacgcattagttatattaatactcttgctacctaagtttttcatctttttaccggagttgttcatataaaaatgaattaattgttgttaaaagtatattaacttggatcatcttcgttttatggtcgatttcctgcttgaagctctatcaggagatttgtgtttagactgctttgacctttctctgcttctactgcgatttctagacttttccctcaactggtctctatcctttgtcttccttttctttagtctttcctcagccttttcatacttgtttctatccttctgtttatccttggggatttctgataaaacacttgagttaactgatgttttacttgttttctgagaaggggacctcttatccggattcttacccatacccaacacactctgggatagtggtatgttatgtgttaatggtggtttattgagtggtagaggtggtatattgtgtggtaatgagggtggcggaatgtttggtagtaccattgggttaagattgaggagtgtgagtttcttggcaaatggatctagtttagtgtgtttagaaaaggcctttaggtgattactggggtctggttgagagtcatttgaggaaagtcgtttcgtgttgcccatgattgaaaccaggtccaagttgaaccatggaaaagtttttgagacgagatcatactccccactcttggcaagttcttcttgttgacgttcaaactcaatttccaccaaatcctgttgtgaaattgcattaaagttagtgttcgaatatggctgtgagaaatgacgacaaactgacttggtgaatggttctgaaactatgccttccctgtacctttcacaacctttaagctgagaaaaaacgtcaacagtcatgggttctgaacctatctgagatttatggttcaaaaaagcggtgcaagatgaaatttgtgaaaactcaacaaaaccaacacccagaggagatccgctgtagaagttgtacaagaccttgcagtaaaccacgccatctgtaatcccctcaacatatgttctaagtcccgaattatctatccaggctggtaaattcttaaccaatacaaaaaactctatgttacccattggtaatctcgatacctctccagacgtaggagcaccaacataaaaactgcgatctacaacatatttacagagttattcccagatatggatactacttatataatattgcggtagataattggtgtaataatagtatatagcataaaaagaataaaatgatacgttttctattaaataatggatgtttcgttgtttttttaggggcagtttgtgcctgggctgggacggcctttgaatccaagtcatcatcattaaccacaagctgtaaatcatcatcctcagcagacgactcttctttctcatataattcctacatcaatttattcatattatttatcaatttattatattatttgtcaatttataataatttggtaacaatttacaacaacttgttggtattttgtaaatttgtgatagagtgtgtgaataaatgtaaataatttgggaattagaggaaataatattaaaatacatctttaggtgcggtgtaatcaggtcctgattgtgaagaatcctcgaagttttcgagtccttcgtagaggtcgaaatctcccgtttcgtcgggatccattgtttaaaattatgtaattacaaaggaaaacatcttagaatataatacaattaagttattaaaattagtggaatgatttccagaatttttacagtgaaatcacaccataaagttggtgaagaataaattttccaaaattacgaaattgaaatttttaatatttatgaaaacatatccacttcctcctccttcgcacttcctgaatcttgcctcttatatacttgaacatatgattctataatacacattttataacattaatactatacatatctatatatttctacagtaaaattagtgttaaccagtgacaacaaatattactacttagttaagcatgagtaaatacctgtgagggcaacttgctgtggaagtatggaagtaactagtagatcttccatttggaaccagtttccagagggtggatgatacacgtgaactttaaatatacctccagttggcttcccttcgtgacatacgttacaatacaaatcatatctcgttactgaatctttaatttcttcagttacatctacaacattttacaattatacagaaagggatattgtgtacttaactatgtaactgggtatattttggaaaggatccaactaatatatcaacagtagttagaacccttcgagaataaataagagataggataataagttacaatctttgaggtctagatttttcattggaaatgagacgatggttgggtttttctccaggaagaagttgtttttggtgaaccttttaattatcaaaatgaggtacgttggtaactttgataacttataagtgcaaacatctccgcttgagttgacggtctcagtcacgccatcatacttactcaataactcaaatatttgtgcctaaaacaatatgtaatttgtactttaagaggtactaagatatactacagtgggttaactatctaagtaagtatatgaggtgggaatgaggaaatagagtatgaagtacctgtggaatagcgttagtgtccatagaatccttaaagattggggcctctggaacagttaaacttaacatcctaaacaaaattatactcaaattaataagattaactaagttaaacatgtgttgaaatacctgaaaggctgacgttcagtttcccagcgattctttttgagtgttttgatgagtaactcgcccccgaaggtcttagtcacaatactctctacaatgtgaaatgaagttttgaacgaacctttagtgtttttgttatgtaacttctggtgtattcgagccaaaagccatgataaaagagaaacagggtcagattggactccaatcttatataaaccgtttgtcactattccaacagactatatcatttatatcatcacccaatggaataagtatataattaactacataaggtgtcatgtagtgattaactaacgaactaatatagtagtagaagtaatacttgaacaaattcgtgaggtgaaacaatgcccttgaagtttttaacgttaaagattttgcgtatgagctgagaaagtgtggttatcacaggatccgggggttgaactttgtttacatcaaaaacaaggaacaagttgcgcaacggtaccacaacacaaatcaactaatagcaattattcatagttagcagtacctgtattattacattaaaatagtctgtatttttcaagttatttaatccaatacaacctataaacatattacatggaattatccactgatgatgaactaatgttaactgtgtaaaaaatacctggaatgaaatcagttccatctaatgccttcccgtaaataacttgagttgataaagtttcaacatcttttttagtgtaaacaggttttaaaaaatgctaaaacagaatttatagagtttatagatgattaactatatttgtaagaaataccttaatatcgtcaagtgaagcgtcatcaacagggtagttttcgggaatgcagtagactctgcagtcctcgaggttcataaacaaataatgacactcctccagtgcgtgtgtatagcagtaagtgtttttaccccttcctataaagtgctaaaaataagataaaagtaccttgaaaatacttcccacagacgaggcaggcgtaaacgtgaatgttactgagtgtaatggaacaaaccttctcaaaatcaaagtccaaaaggtgacggtttatagtacccaaatacggacaattcaagaccttaactattaaattgttagcgtatgtaaagtatatctagagttatatatactaataaagactaattacttgtacataatttatgaataaggaataaaacctttgggaggatctgaaactttaggtacaggagattcattttgatcatttaaaggttcttcacattgtgcgatagtgagggtttcatccaaactcttattgttattctcagataactcattatcctcattaactttctgaccttttttaggccttgagggggatttagatgaagatttagcccttttggctggcgatttactaggtgatttagatggttgaactggtgatttgctgcgtgaaagtgaccttttggaggttctggaagaccttctgttagttgattcttcaactttcggtggagtatctttaacaggtttcaacttcggagaccttccaggccttgtattagatttaggagcaggtgaggcagatttagatcttttaccacctgatttccttggtcttcccaccattcaaatttattaacatatataattttattaaattgacaattgaataattttatataattttatttttgatataaaacaaaatttgttcctaataatgtaaaataagtgtaaaatctggtgataaaaattattgtgtaatttgattaaagtgattcttttttaaaattaacctttaatatattttataaattgttcgaaggcataaactgtacattttgagcaaaatcaatggttttgtgatgtgtaaaaagcatggattccatcttcgggtcaattgactgttgaatccaccatttcattatctgttttgtattctcgaaccctaaagtaccaatttctcttgggattccgaaatctattttgttgaacatttttataaacgaatttttagttcgctgatgttacactaaaattgtattgtagattttttactaatatcaacgaaatttagcagaaattaacaggattatataataaaatattaataattgaattttgtaaattagattaaaaagctggaattttttttctggaaaattctctcaaattagattaaagctaactaacactaaattaattcttagctaattaaaattaaccaataaaatgctctaaagataaaataaaaataaaaatctgagaatataatgaaatatcggtgtgtattttcgagtttatcttgcatcgcaatcataggtatattttttcagagaattaagcggggcatttgcagggggagaaacaagcccagaaagactcccaaagctgttgactctgactcttccgaagaatctctaaataaatgtgaacacatcgataccgaagacgtcggcgttaattcctaatctactctcaatactcattttcacaacatattatacatatgtatgaacaattgcttaaataaagtattcagatattataaaatctataaggtgtaaaaaaatgtgtaattgatgctagatgatagaatatcacgagatgggggcgtgtgacactatgtttagggctcgaggaggctcttggctccatttcccctaatgcttaaaaattaatctggctcttgtacaataaataaatttaatggccagatcacacgacctactccctaacgatgcccgcaaaggttccgtccggctctgcgcgctctaataaggccaagaccgtagatttaaccaaagaaatcaagatcatcaggaccagaagcgatttcgacaaattcatagtaaatttatttcttattttctctagttatttcctaaattattcttaattttaccttattttaattattttatcaattttatgccttaattcagtcatatttttttcttttttaaccattattctatagtttatttactccaatattgagatatttaggtgtaatttaagtctttgatcttatttattccatataaattaacgaatattttatgaaatttctgctatttaattagtaaattagtttattagaattgataaataaagttagattagtggattgaatatgattttgtagaatttgcaaagggaaggtgccaattccgagactttggatgatatcaattccctgatagactatgtggttcattcgaaacagtcgaatgtaaacaggacaaaacctttgaaggacgtcgttcgcaaaaaaatcgaagttccgcccacggttcttcataaagatgagaattttgtatcatacccatttcaaatacctccaagatacattagatatatccaaacacgtgtcaggtaccacgagctatactttagttaaactgttaattatacacaatctggatgtatcataatgattattagtgtccctggaataaaaatatcggataatacagtcattcactataatttatataaagaagatcgcctctttatcgaaacattcaattcaagatcctccgacttacaaatctctatcgtaccgcatttatactattgatataccattagtatagttatgtagttaagtatatgatataactatttggagatggaatatgccgtagaatgaattcttgataataatggacattttggagaaaacttcatcacagtgtaatgctaataaacccttttcatatgaacttggtatggaatttctcttattttactttctttagggttactaatggccagagaaaatggtgttgcagtacccgcatatatactacgcgaagttcatacagtatctcatccactattctgtcctacctatatacttggttatataccaaataccacttatatccttgaccaattaatggtattaataaaattgtagcattgggtgagaagaagaaatgagttcggattgcctttgataaggcatttatggccccaaacatgtccaaatgacgcatctccactggctttgttcaggccaagagctaaggataagatgttgctcaggagatccagaagaacacaagccgagaatattcagtatttataccatttaatcgatggtttcaaacgggtactacttttacaccagaccagttattctcaattatataatacccatattgggggataataataatgataggtattgaagatattgagtaagatgaggcagagggatgaaaagaagttgatattagccgagcttgacattgtcctgtttgaccaaaggcgtaatgaacttgtggaccccacctacacttgccctttttggaattgtatactagatatcaaaaaatccaaagccgttaaaagacgtaaacccaactctatgtacctaatacctcatttagccacttagttaggtatataatgcgcttaactgagtgattatttaactcaataacattgttttagatgtagtgatgagggcattcctggtagagatatgaagttggactatgttgagcgtacagttttgggtgagaatattcttgatttgcctgaacctgaaagctacaaatcaatgcgtctcacaagaaggttaggtagaggtggtcgcatctggatcgatcgattctttatcaatcataacactagcgataacattcataacaacgttaatccaatcgaggaattggataactctgtagacaataattctgtcgcagcccaagatggaacggatttggaaaaaaatactaatacaacagtggataatgtagaagtggataaagaagtaagagttaaaaaagaacccctggaaccggaaaatggtaaagaaagtgttgatgatggatttacgataaataataatctcgacagagcgttgaatttgtcaaacttcgacaattttagcatttattcaaatgaaaccgttttggatactagaccacccttcgctaacccatacgaagcaggtcatgtatacaatactctaggtaccgtttcgttacataggagtatttcctatataattcacatagttacacgtctattcacatcaaatactaattatatattaattgttatatttgttacctctagttaatacaactacacttacattatcgcggtatcaattgtatgtttaggattatcattgttttcgatacctggatatataaagaagcagtttcaggtgctgaacatgctggacaacatgaatgttcatgaatcctcgaaatagtttcattcactcctctgcataatttttccaaacgccttccaacactttacactaataattattaatcaatttatttgttactttaatgtattgaaaaatgtacgctgaaaatgtcctgagatattataataacttgacttgcagacagtttaacatgttgggagactatatccgatgctacgaaaaagtaaatcaactctcgccaatatttttcttcagattaacttgaattatttactaaatgataaatccacggttgaagatgataataaacaagaaataccagatgaatcagctcattccgtaatttatacataattttacatagttatttaacgttaaatttgattaaaaatagtaataatatacttaatacaaaataatatatataatatataattagtaagaaaatgtgtacaggaaactgagagtacgaatcccttgttaaaagaggtactaaactttgaacattaaattccgtagtgtttggagaagaggatggtgaattattatgataatgttgttttatcttccaagctcaaacttgccgaggaaaagattgaaaaactcaaggaagaagccagaaaggcctcagaggatttttattctatggaacagatcatgaaacaaatttattataacgatcttaaactgtcacaggtacttataagtagactgacctttcctggataacttacttaattagctaaaattatactatttactagttattatactattatttttacccccgtcaacagttaataatattaattcaacttttactaaattgtgttaaatttgtctatatatatatatatataagatttcatgactaaaaaaattgctatagagtgagaatgagaagaagatggaatatataatgaaaaagagtaaggagaatgaagagttgtgggaggagaggaagagactagtgaatcaaatcctgaacgactacacatcaaatgttaacgaatgccttaaaattaaagtaaattatatccacagtatttataacaacgttgttgtcaatgctagttagaaaattgctaaaattagttaaggaattcctaacaatttttcaggatttttaccacttatttcaagaaaattcctcaaacacattaacgtaacttttaaagctgatttttaatattttattataaatctttaatattctaatataaaccatcaatgataagatagctattacaagttgaattaaatttcagcgggtaataatatcaattaaatgtgttaataataattataatagtaactatgagggtagaaagtggtataagtgtgaaaaacgagggtgtagagttctcattacaccggcttgcatagtatttgcaccagctcctgtgaagactagaggtcaaatttgtagaaaagagaccgaaatctggaattttttaattttgggatttcgtacgtattaaatcaataattgaactgatttaattggaattttaaacactttacaaatttataaaattcttaaacgagcccagataaagaccaaaactcggatttaaaacagattttttaaaattaatcttaaaattattcgtctaatttaataaattaactcaattaattcttaaatttatgctattttatacccttcactacattaatcttgataaaataaccgattaaacgccatactaacaccgaattaagggataaattagactggaattaatagtaaataaatactaaattgatgataattaaggataaaataagagtattttaaagataaattgaagaataagttgaggtgtggaaaagaatataagggagtagtgtaaaaggaagtaaaattgggaaattgactgttttgtgggaattatcgcagaaaggaaattgttataaatattttatgttaatttttattgttttggaattttgttattgtgatgtgattaatggattgtgttgtgtaattgatggattcttgtaaatctgccaagttggtggattcttttgataattccttctactctgagaagaacttatacaagaaggaccgaaacctctctgactcactcggcgataacttggtttatgaactcaaacaactcgactcgacccttgatgatctttttcttaccactaatcaacaacttaatacacattattcaatacacaaggtaataaattatccagttccttctatactagctgtatgcttagttttaaatctatatactaataatattggattactatagctagatatagttagggaatattaataattgtattttatagtttcgcctaaaggtatcaaggcgtataagttcattttcttcaattttaaagagtttgtcgcggcaatgtgagtctctttcaaactcgcaacaaagagttaagctattcactttacatcagttctacaatgacagactcatgaagttagttttcaactattatttccattctagttatacatattatacctaagatatctagaatactattctactatacttaccataagtaatatactatatagtgcctatataattgtgtaggcataagaatagattgagtgagtggtggtcgaggaatgagcgtcgttaccatgatttatatctatcatcgttcgtttcccatatgaaaaattcagataaattgtaattcattcccattactattccctacactactattcgaatattttattttatcccacacttttactgtgttaatggtgtttactcttaattacagaactcttaactgagtcaacagtattaacaatattaacagtagtagtattggggatgttagtagatagtaatattgattgaaaaatggttatgaatattctagaagaatgggtgcgtacgagccaagtgatgtttctgagaatggggactcggacggtgatgaaggtttcatcactaaaaaacttaaggacaccaggaatatgatgatctcacaaatcaatcaaatggacgcagctgaaccttcactccttcaatcttcacaatatattacacaacaagtttatattctcaactgtatcttattacctagatatatactaacactatacaatagtattagttgtatacatttatctatactattataatttgtagtattgaagaataagtttagaagcgtgaagataacttttaacatagtaaaaagaaggtaatagttatcggtacaattgatgtttagtgctataaagagatatggagtggttagaacctgctactttttcttttttggcacttgcattttcatcttcatccgcagaatcaaaatcctaagattattcaattttgtaactgtttcaatagttcttcaggacataataatactcagttagacagttaatgctgtggtatatacgactaattaatgtttaggtggtgagagtagttaaaatccccgtcaagtatttcaagaggaaatatccagtaaataacgttgaattttaatgtagtataatttgttaaatacctactactacactgttaattctagttatataatgctgttgtcacgagttaacacctttgccgcacaaatcatatgcccattgaatccctgaccataataccctagtaaccctcttaaatggaataaacatagtataaacagataaaaatatgtatgtttactctatttaatagttaatttgctgtaaattgagagataaaacagctataactaattattagacttgtaacactctagttatatagggatgaatatacacaattgtatagtagatatagttaaggtatagtaaattagtgaaataaaaacagtgtgggtattaagcggatttgatcattttttgtctaaatcctcgatagtaatttacaaattccgagatgaagttaatatagtcccttctccaggcatcaaaggcattctgcattttagtcaccataacattcacattcttatcaaacttatgaccctacacattatttaataggtataattatgatactagaatatagttaacggtggtgtatagttaagagtaaataggtgtaaaagtaagtccctgttatggaaaaaataactgaatgacaaactattccaattgggttatatctaatactatagtagaatatataactcagtaaggttcaagcacggtaacgaaagatacaatatgtttgtccattagtgttaattgtatgatttcatcatttaacttcttttgaaagtttttaatggaatacttgaccttgagtgacctttccttggcatacccaagcttcagctcacgtctgcaaacgccgcgatcaagcgaacgcagtaaatataaatcataattcttgagaatgttcaacatgagcgatgtggtacacatcgagacggttttaggaacgtagatcactctctcaaggttcttcaagctgcaccacaaaggactctcagtattgatcatcgggtcatcgttgtgacaaacataatctaccctgtacttctcgattaactcttgagtaagttcaagagggcaaggcgatacgatttcgtcaacccacttaatgtgttcgagggttgcagctcttatgtgcagcggctgtatgagcctgcccttgcatgtgacagtatcctcatcactcaaaaccccaacaattaacttaacacgggcgaacatcttcttaacatattcaaagtgcctggcgtgtccatagtgcaaaaggtcgaagacaccataagtgtacaccacaacttcctcatcgtctttcaagttaccggatggcaagttgagctttggaatcgactcaactggttccatagtaactgacttgctgtagacagtctcagcaggatccacatatggaatttccttaaaatcctctaaaactatcttatgcttattcagccaaattgctattgccttaaataaacttgatcgcaccaagtcaatacgatcattaaacccagcaccctataaacatatgttaccctgaaaggataaactactaactagtgtattggtatatgatagtgtagtaactaatggtataactaaaactaggtgtgtgatacgagaggttcatcggtgagtgtgagttgagtgatttgagtggatagtttgtcaacgagtgcgagtatggttttctttaggagaatggactttccagtggtaatgggaatgttaaggtcagaaggcttcaaaccattcttcaaaaacctatacacatcattaaacgattgaaaaccacggtagtaataatagtgtagtataaagttagtgaaattccgtaaaaatttattcacaaaattgatgagaaaaaataaacgtcaaaatctgatgggggtataaaatctaagtaaagaaaagtaaagagacttgtcgatgaaatcttcgtaattctgaagtattttgataatacattcagttgtgctaatgccttcagtacgataagttgccttaaatttaccctacaacattttacgttcactaacattcagaactacttatcaaaacatatcgggttaattacactaccaatcacagtaaaactaaattacactgtagtatacagttctaaagtaccaactcatgataatatactgttaaaggtatactgttattgttatattattagtatatagtttgtaaggagtaactaggggctggataagtaaattgctaacctcatctttgagccatttataaatatcttcacagtgtttagttttgttttcagaaactttctgaacagcgctgtagggaatatcgtcatgggcgacgaagtcaagtttattcttatgaaagaaatcaggtgtgataatccaaggacagggagcaattacttcgtcaacccatttgatatgcctcaacatctctgcacgctccaccatcgtgttgactatgtgactcttgtaacggacagtttcatcgtcctcagtcacccctgcgatcaaatacacgttcttaaacatcttcttcgcctgctcaagatggcgcatctgtccaagatgtaacatatcaaacactcctaaacaagttatacaacactgtcactaactgtactgctgctatacttaactaaattggtaaaattcatggtaaacataactccaaaaaacacaaatttagaaaaaagttaaaaaatactaatatcaataataatggtgaatagcaataaaagataatgttggaatgtaaaagaataccatcggaatagatcctataaactcttccatcgtcgttttctgccatgggatgtaattcaaaaaatcagatcagccgatttgataaaaaacgatcccaaaaatccaactccagttagaaagacttagtatcttgttaacgaatccaaatctagttaaaaaattcaagattgtctaaggagctttcaagttaattccgattaaaatgagtagaatcaaaatgtacccagaatatttaaattatttgcagatttactaacaatttgcaaatttatcaaaaaatttacaatttccaagtaatctgtattaaatataaaacaacttaaaattttgaaaaacttataaattacctaaaatcaaaggagagtgaaaatgaaaaaaaagtaccactaaatggtgggtagtactgggagataagtacagaaaaacaaagacaattttaaactaaaagaagatttataattatgtaaataaattaattcattaaatttatattaaattattcttcaattttagtgaaactccagtactcagcgggtcaactcccaactcatgattccactgatccctccttactcacctgatctattattaccaaatgtgctattcatttaaaacttattttactaatattgtatattctagatctattggaaataatacaaaattaagtacatacatgcaaaagaatcttctgtgtttattgctaccaatatacataactataatcatagtaaaaattcatgattgtgtagaaaatgtgacaacccgtaacaataaactatataaataaatatatacgactcgaaaatgtgtgtaactagtatagttataactagaatcacggggtgtgacggaacagtaccaatgattgctgaatttcagtgaacaaatcaattggagttgatccggcctgaccaacaagatcaacataaacagcctcggtagagtgattagaaataaaatcggaaaatttagtattcttatctatctctcccttctcgaccatggtctataccaattattagtgctgtactattaaatacactgtaatatagtacatatctacgtaaatagtgtagagtgtgtaaaagaaagttccctgatggagaaataggctccgtaacgaacctgtaaaaatgttaaaaatctttgcctaattttccgttgtaatctaaaggaagtcctctgagcttccttatatttctgagcgaaaacctctttaaatacatatttgtgagagttaagcacatcgatgttgtaaaggccttgaaagccaagatacttggccttggcggtttcccagggaataagttcctgagtgtagtccttagtcatgacgtcaattagagtgtccatggctgcgatttttgtctccttacgctttttcttcagtttattctcctccctttccatgaattcctgaaagatagcatccctggtaacttcgtcaccccagtcccaccactcagcggtgtgaaactgcttcgaaaaatctgcgtaaaccgtagcgtaagacaactcttcccagttcagcaactcacgaatcatcacctcctctagcatacccttcttcttcctctgttcctcttgttttcgacggtgaatttggctacaaaactcagaaaacaactgcttcttatctccctttgataatattgaaaatacaggccatctatcaaatatttaccagaggtatctaataattaactgtataactgaaatagtattagggaaattgcgtaaagttacttaggatccgcttctaataatttgagagcattatcccatgtagttttttgagtaaaattaaagctctcgaggaaggtcatgaaggctgccttggtattatcttggactgttccaaggagattatcttctgccaacagattcttaacctcttcaggtacctcccaaacactctctttggtctcggtgttgtagtaaaataccttaccctcggcagttgcaaaggtacgccacttagttttagcctctattattaattcttgttcagttttcagttcatttggcttctcccattgcgatttcttagtctatagacttattaccaacagatctgggtattatatacataactttactactatatattgctagaaagggatctaactactatattatcaaaggtatcagaataaattaaactgttaatatatgaataaataataaaaaagtaaataaggaaccttttgattgtaatagtatttccttccatctttggaaacatgttcagtccacaaagattgagaactcattagaataaatgtaaataaatacaaaaaacagaaaattaacgttgattataaaaaaggttaaatttatgtcaaatcaacatattctgaatcattctcaggagcaactccagaagaagcaccctccatcttctccttcaactaaacaaattttaacaaaattataataatttaatagttaacataataatataataactgtattgttaatttggtgtaaaaaagttactttgtataaaacttttatcttccaattatcaagtcttcccagtgactcaaaatccctcctataacattttatatacaatctgtattatttaactgtatgctactaatatattattgttagtatacaactaagtagaaaatgtgtaaataatttcaaaatacagttcatcttgtaattttgtaaagtctccaacatcaaacgcttcaattaacgactaaaccattgttaaacaccaaataatttactattagtatatataactgggtaaacaataagactaagccccctgaatgggataagtaaaggtaagccctgtaaagggatacattaagtaattttccttccctactggagccgaatttagaatcccaagtgcaatatttatcaaaagcgattctggcgtcagtagcgtccgcacttaaaacacgaagtacaccggccttaaacagcaaatccttaacaccatacttcaacaactcgttcttaatattctttctaccctcctcttcatatatctacacaattatacaaaccatacaatcaattgtatggttaacttttaacagttttaacggtagcaatactgttaataaataaaactatggttaaacgtactcttataggttcttcataggaatcagtaatacaagacgcaagatcagcgtattttaaaagtgattgtgcacttgaaaccttgccatattcgtcgagttcataagattccgaagcctttttgtagaacttcatggcactttcatagtccagttgttcctcaaagttctctgccaggttcttaaatatgcggccagtttgagaaaaccgaccctgactactatacacttgagttgctctcaacagcggcttcacaaagtctttagctgcactcaccattaatgctgtactatctagttaactgaagttaataatatatagctagtattaatattattgttagtatatagttggtagtagacaatggatgatacacatgggatcgattttcctcatgcaggctgaaacctcgactaggtttgaggccaaaaagatactatccttgttcttctcgcataattttgcagcttcattataacacctgcaggcgtctttccctaaaatatattcaaattgttgtatagataatgtgttcaacactcttaatgttaactataacactaagtattcctttaactaaatatatttgaaaaaagaatttaaaccgctgctaatataataattattaataatttttgtgttttttaactgaattagtaaaataggtcatgggtgtaaagtacattggcgtaaaactttgtatttatttccagcctggttgtataattcttgagcttcctcagttgaatcgccaaaaaaactaaagaaaaacttcctgctacattttttagcctgtttctcaagctcctgaggtgtcgacatcgtggacgacccttaatattttataagctggaattttacacaaataaaatatatttacacaatttaactaaaaaagttaaattttataaagtctgcagaaatataaaaataaataacagcaaatctcgaaattaaagattcacaatttcacagataccacatcgtacacccatccttactgcttatcaacacaaccaacacatttaccttaatttaaatatgtaaataaaaacattgtaaaattcatgataaatcgcaataaattattaaaattaaaaaatattaaaattaaaaaaaggtatataggcgttttttaaaatgtgtaagactgttgtacaaggactgcattaaatatgagaaacttaacgagcaccggctttcaagtcaaactgctcgacttcatagttagaaaggcgctttgaggcgtaaaaaaattgggccgtattcgtaaactacacattattataaccaacccaggagtgctaattatatatataactataatagtatagaaagatacagctttgaaggcggcaagtgggagtgatccatatagcaaaaatcgtactaaaaaataattaaaaatttggggaacttaccaaaattgtgaaggttggttcctggtttggtgaaggtgaggtaatacagtgacaggaaaaatgtttcaaaacatacaatggaagttcccatcaatgctatattcattattatatattatatatggtatattatccctgatagtattatataactaattgtgatatatccctggaagggttgctgtagtgacttacgtcttttttcgtagtacatcttgagaaggaagaatccatcaattttcttgtggtttgtatttcccaataagcaacatctataacgttttattttgaaaaaaaacttacacgtagttatgagcccagtgaccaacaacatcccatacaagcacaaaatagaaaactattcaataattaatatcatagataatattgtaaatagttagataacagtataagaatttgatatctgaacaaaaacttacagagaaagtatttggggtatttcatggctaagtgcatatagacgaatgcagtggtcatcctgtcaaataacgaatcgaacattgctccaaaaattgttgctacaacatttttcatcattattcactaactaaataaaatatcaagagtagtataatatatgaaaaagtgagaattttgaattattcagtatattatcaatgaataactcagtaaaatagtataaataatttgtaagaagtgtaaataattgttagtagatcagtacattcaccatatttcctggcgacttcaccatcaaccatatcaaggacgacacttgaaacatagaatcccaaaaagtagagcggtttagtcttatagtacagaaatgaggtgcaaaacaataacaccctgaaggaagctaaaaaataaatcaatgcccggtttattaggtgttaataataataaaaataacaaaaatataacaaatcttatagtattaatggaggaatatatacgaacttatgaaattgggtttatttaataatctaggcctttttgcctccatgttaaaatatgttacagaaggaataaattaaaaagtaataggaaggtgcagttccgggaatgtgcaacccccatataacatttgtactgttattactaagatttatgaagattgagcctggagatcctgtaatcctgttctcaggacctaataatatttatttttctcaaattccaaaagaagatcagaaaatccctaacaagcaatccgaagccaatgtaaaaaacaagagattaatacataataaaaaaggaatcttcgatctagcttcttgtataggaaaattttatggacaaaaagttctcaaacattttttctactgttctattcagttatataccacaattctagttctaactatcacattattcgtagtttacccttctcccttaaaaatactcatttatatagttattctaagagttagtttataactctgtaaaactaggattaataagttattatagttattctgggatgagaataataaaaaacactgggttgtattacttaaacctactcctgaacttatcactaaatccataatacatcgaacacaaatcttagtataccactagtttataatagttatatatagttaatatactattgatgatgtgtgtagtatagagctgatatatcattaatcgtattattacttgatttaatgcctgggaagcgtgtacttgaatgcggtaatttgaacttgaaatataatcgttaggcactggttctggttccttaagttacgctttagcttcttcagttgctcctaatggccatgtttttacttttgattttcatccacaacgaattcaatattccatgtactccaaactaaacatcctcctgggatgccttatatacttacctatatagttaacccattatagttaagttatttagttagctgtagaaagtaactctgtctcatatggtttagggatttattcgaaaaaacaaaaatttccgatttgataactgtaactgagactgatgcatattctgataatgcgtttttggtcaatgatccaactcattcagtcactgaacactcaattgattctgttttcttagacattccatcgccttggaattgtatacataatgttacaagcgttattaaggtgagtcactccatgttgttcatcctataacttactttgttccatagttgtctatctgaccccatcacttttgtcatttgtttctgtatttatctaatatataccatactaccagtagttactatggtaaatatctatgttttatagcattttgggaagttagtgatttttataccatcaatagaacagtgtaataaaataacagagtgtttacacagtagcggttacatgcgtaagttatttttaattcatcccttttagttattcgaacattcgaagttttaacaaagccctggggaatcagctttacaaactctgataccgccgattcagacgatgaggatccagttgttactggtaagcaggtggataatactgagaatttgggagaatatgtaaattatcaattgccacagtttaaccatacaggatacattacagtagcaacatctaacatatattaatgttatactaaatcgaccatatataatctaatattatatagtacattatgtagtatgtacatacacagtatattgggtatagtaaattactatggtacaactagtgtcaaggccaaagtgttttaagaatatttaaaagtgaatctttcaagtattcaaactcctttggttcatcaaaattctcaaaattaactctttcatctttactacatctctataacattttacatcaccggtagaggagccacatacttaactatataactagtatattaatggtataataggcttaaagtatactttgaacatgagtttgacaatgagttgagtgatgttgataaccttttcatagtttatatcatcctcctgagctgcgataagttggagaaaatttgagactgcaaagatttgggcgcctgtacacttagttaagtattgaacacggtctggcttaaagttgatgttgattcgtcggttaatctcatcagagaaatataactcgtagaggatttgaaggaggtgttcatttcgagtaagagacaaaaccttgaataggtgaataccaagccagtcaaagtaattccaatatcgagaaacaaacataggtctttccaaactcagattaggattagactctgaggactccggagatgaatactcagttaacagtttcctaaaatattcaagagattcaagtgcattatctttcgtgtagcgtgtgcattcaagaaccttatccctacattgacgagatgaacgacctggcattaactcagaaattctagaccaatttcttccaaaagcactcatcaatagctttaatctgaacaaatccttcttcataaatggtgtgtcactggctcttttctaaacatattctaaggagttactccctatatagttaactacataactaacgccacgaacagttaactagtaacaacaaatatataactaggtgatctatacgtttgagatttgtcgatatctgagtctacactgctctggattttttccagggattttggatgagattttccgccaaggaatgcccgtgcggccagacgtatgtgaggggtcaggagagcagcttgctgaagaaacgaggtccaatagaacagattcctcattggaggtccaattacgagtcctagtcctagtcctgtgcaaaaataccttcatatactgatacacagatacacccaaatacactgagttctccacaaacctatattcaatatatgaaacggagttattctatacatagttgactatataactaaaaacacgaaagatagtatagtgtaaaagttacttgttgaaatcgtgtgattctgtgagaaattgttcaatcctttgaaaatctgaaggtgagacatcagtgagaagaacaccagaactggttgagttgatgaacttgatgcagcagtctgtggataatttattggccatattccctttaagatcagaattaaaggaactagctactgtatcccagaaaactgaaagatcaagcccttgaaatttgggtctattgggtaagtaaatgctctcaaaacccttgtaaacactataagaatgaagtaaactttgtaaaaactggtcatactcatcacttatgacaagattagctaattttctcgccagtattgagaaatcaaagttgaggtaaattagataaaggagtctggatgaaagaagcttaagtatttcagacagtcttttattctcgatgtaagttagtttgtcagttaactcgtcgattttctcagataaatgagaaattacagtagtacgaaccagtttgtgaagctttacaaggtctgactcagtccatttaggtacattccagtcgtatttcttgcgatataagggtaaattagagtaaaaagaatgaagacgacaagagtccaaatttgaactcggacgaactccatcagtcccaatcaattgcgatatttccttattatcactcataaatcattccattcatcgaaaatttctaaattcagtccaatttgaccttaaattacacttaattcttcatattttagttataaaaatgtgtaaatcaactataaaataataaaatctggaaattttatagtatgaaaatatacaaaacagtgatgattactagaaaatagtttaaaagataagaaaaatgatcaaaaatagaaaataaagttgattcccgaatgtgcacaacaacctttaaaaaaagtggttaaaatttaattatttaatgaaatatattaacttaacaattatttaaaatttctagagcctctgatatggaaattctatccttagggcacctaaatccatctaaacactcggataaggtaccatctgagaagtaatttggccaccaatccaatcgcctccaatttcgagttcctatcaattaaattaatactttcattagtgttattttacccttttgataagttatcaacgattatatcaagttttttattagactcgtaaatcttgaacagctccttagccttctccttctatatcacactttaaaccgttaatcttactattccttcccttggaactgtttttagcatcttctccaattcatatctataatacttattatgattaaataagtttgaggttcagttgtcacgagttaacacatttcccacatagttaattgcgtagtattagtagtatatttacctggacggtgatcctagaatatcaagaattctgaggacttgctgagaatcacagctgaaacaatattatgacccgtataaagtactttactagtggtatgaacagtggcttcagtagtaggacttcagcacagatacacccaaaagctgatgaaaaaatgaaaaaattcatatttacacatacaccaggcgtctatttgctcctaaaacatattataggacttatagagaatatctatttctgtatttatataactgagtatatggtatagtgtgtaaccccgtagtgagttgatccgaaaagcaattcaggagccctgtaccatctggaacagatgtacggagttgatttcttataacatttatcattaactaaattgttattccttttggcagatcctatttcaatttatattatactactaatactactatacttatatacatatgtatatacataatatacaaatgtgtatagaatatatgtataatagtatataattaataatatatattaggaatactattacctagatcacagatcctaatttctttaggatttacaatatgatcaatctaaccaaattaacaattgatgaacaaaccaagatattatcaggtttcaaatccctgtgtattaatcctctgtcatgtatttctttaataccaacaccaacatttctaaacaattagatattctaagcaggaatataccgcaaaatgtatattaacttgtcacataagtcactgtaaacaccaaggccagggttcacaccactcaactgattgttggaggactgttgatttacacaactcagttgaacaatagtatttggttgattattaggattggtgtaaagtgttggattgattggacaaggacaatcactaaaagtataacgaataatgttttggtaagttgtttggtagttagtttgtgattgaatttggtagtcagtatggttatttaaggcaaagttcttgttcatctcacactttatcatcctgagatatgctctgaaattgtaaggaaggtgttctagaactaggttttggataaagtttccacaagggtcaattgtgtaaaaactcccaaagtacttcaccacgttattcgcacctttacaaatccccaaattcaccagttctcgagatctcttcttaccactttcaacacattttattatatacgtaaatattatacaactagggattaaattggcaaaattattgattaatgtaagaactatataactaagtatataataagttatatacggaataacaatttttttgttcttttaacagcgaactgagttccagaatcgtcagaaaccaaataaacaactccgaaagctcctctggcgattctcctgtggaagatcaattttggaggagaaacggccaaagcagtcggagacgagaatttctaacaattcaattagacgatttctaactattttttctgtgaataaaaaaatgtgttaccttcttagtctccatttacctttacgacatcaccacaattataataaccgaatatttcctaatttcaagcacacatttaatttttttgcaaaaattattattaatatttaatgtatgatttgttatattaaatttattcttttcagtgaaattttctcatgaactttccagcgattttccttcctcttttctcaataattactttatcgcaaattatatctaaagttaatgctacaaatccagtagaagggtcaaaagaactaaatgtaaggttttaaatctataaacgtaataatgtgtagaccgaaggagacatttcaggttaaacaaatctttataaaaatgttcagactataaagaatacttggacacttttacaataaagaaatttttggacaaggtacttaaattaattacaattttattttagaaccaactgctacttaccgaaaatacacttttcttgtcatttttaactcaaaactaatatattcatatgtaaaacacgttaaaaataagattatagtacaattaaatcgttcttctcagttttgttattttctctagtatcaaataacaaaaacgatagagattcaaatactccctcaccagttattgagcttcccttaactaccattaatctatacaatcattatacccagtattagtatagtgtaaagatatcaaggaggactaggaactagcctattattgagttgttcgggaaattcaagtgcctttctaatggattgatagttcattcctccgaaaatgtcctgaacgtcattagtgaatttgagttatacattttttgcgagaaagataacatatttgggcaaattgtgatgataactgtgttctgaaatcatggttaaaatttccttgtttatctcagagtatctgaaatccccaaaactgtcaaccacatatattatcttattacatatctacaaacatcattactactattatattagtagtatatggttaatattagtagtatatagttaattgagttggtgtaaaatatacttgtatttgttgttgataggttgaaatgggatcattatagccaagttcgtagagtttgactttaactttatcatattcttgaagtttagggtgaccgcaaattgaggaggaaacgagacagaaccgacacaaatacagttcttcttcaataattgatccggtggcactctaatttaggtatatagaagtaattatccaagtatatatggtaatgagaaaaaaataccgtggagataaattcagagagtttaatgcgatagagaagggagcttttgccagagtttctagccccgaggattaggatgttttcgcagggtctattgaaactatcaagaagatttgcgtaaaggtcagttgttgacctgaaaatgtacttgaaaatgagaaaggaaaggcgtagggataattggagaagtttcccgctaaatcttaaaacattaaatggaaaagtctttataaaaaatttaaattccatacattttacaactattgtacaaaataaattataccagttaagttatttcccaatttgacaaaccccaagattccataaaacgcaaactaaaatcacatacacattaacttaaaaattgttattattaattctcacaatttaataaactaatttattacattaaaatcgtctctaatattcaatttatacattccatactctaataaaactctgtcaacttaataacaaaattctcttatatataatattaatactctctgatatactggaatctatatttaaacatataattaatgctaggaatcttgaggaaggatgtatatacacataaattgggctttacattttggtgaatagatttaagaatttgtttattatttacaacatttacctaaaaaataaaaacagttcatttattatatcgcaatgatttttgtattcttattttacaatttttgctgctgtttcgcgctgagaaccagcccacattcgaggaagctttttttcataaattctagccctcctcttcagttcaacaatagaattcagaaactttacgaatacgatgaatcattcaatgatcttgtagataattatgaatcccaggaggattctcagcattaccaagaagggtctttccagcaaaaggaagtaccccgtgatcacgtatcaaatttaacacattactaaatattatttaatttcaataatgaaaattttagttcgatttatccgcaaattcagtcacgctctgtggaaggatcggattcatagctgaacctactgtttttccaagtggattcagggctttaaaactatctattgctacttcagatgtacttttaaacccttcacagattatttagagggagaaagacggaatagttaaaacgcaatggcacagagttatcctatacggaaatcgaaatgtggactacgtttattcccgagccaggcaactttttactaacaaaaactatccaatcattatatactaattaaatgtgtaaataatctgttagggttggggacaaggctcttgtgattggtcagcttaaatactacaaacctcaaaatttcggttcgtccttttccagaaaattaatgataataacgataattaatttgattttagacgcaagtggagttagtcggcctaagatcgctgaagtttccgtgagttcactcaggggaggtgacaccttcatattaatgcctaagaatccttctaatcctgagaataattatgtcgctgcaaaccaacaaatttacccagaaaatttctaaatgttttacaaaacttatgaatttttattaattcgttctttttattatatgttctagtcctttaaaccaaagtttatgtgtattttcataagcagcgtagctcagagggagagtggggggctcataacccccaggtccgtggatcgaaaccacgcgctgctattttatttttatttaattcttctactcccactatttctgaaaaggggaagtgtgttaattttggccaaaaaatgccaattcaggctgattccatcgttacggaatccaatttacgcttctactacagtattaatttttatttactccattatccattaatattattagttatctaaggagttttataaaattaattttaatgtgtacaatgtagaaaacttttgccctattaaggacttggtaagatggataagttacgaaggttcgtggttatctaaaattttggattttttactgattcacttcttcagaccctaccatattaaggagaagagagatctcacttactcttcacaaaggggacactactgatgctgctgaaatttacctgagatggcaagtaatattttacacagattttttgtccctaaatttacattaattattggttagacttttgaaagttttgaaaacggctttgagactctttgtaactccgattctgtaccgtttaaattcgatattggtattctttacttattctacccccaaatttatctattttaaacgtatataactttaatataacataaattccaaatgtgtaacaaacggtttaggtgctatatatagcaaaaagatatcactgatgcagttgagtggtgattttagaccagtagagcgtgagatagtgtttgacatagacatggacgactatgacgagtttcgaacatgttgttctgaaaagaaggtgtgtaacaagtgctggaggtatattaagatcgcagtagagttgattacgaagactctgaaggaggactttgggtttgttgatattctctgggtatactcaggaaggcgtgggatccattgctgggtgtgtgatagagcggccagacaattacctgccgagggaagaatctcaatcatcgagtatctaaacctaatctcagacggcttcgccaagaaagttaacctctatgccgtagacaaacatcctctagttctcagagcctttcacatttgttaccgtaacttcaatcaccttctctcagaacaaaattttttctatcacaaacatcacattaaatcactactggactatgtaccagaaaaatactccaacgttagaaaatctctaaataactgtctcgaaaactctcaaagtattatttactcaataattcatttagtatatctatatagctaactcattgggaaataacagtgtaatgttgtagaaaggtatagttcagtggatttttttaacagtatttgtgacatgttgaatttggtacgacccgaggattacattgggaaggtggaatctggcgatttccctggctttttcatggagattgttattgcgttctcttacccgagacttgatgttaatgtcaccaaagatatgggacatttgctaaagtcgcccttctgtgtacacgctaaaactggtactttataattactattccacattataacagtaataatttgggtttagggaggatatgtgtgcctttggaccatgaaaatttggataagttcaatccagaatctgttccaaccataggtattccactattatacgactctgggacatactttacactagtttaacaattatatatacagttaactacataatacccattgagagacgttgaaatagtataaatattgcaatagagagtttgattaatcattataatgagggaggagatgtgaataactcgccaatatcgcagaatctgttgtatttccgggaaaaatttcttagtaagtgtttgtcaaacctaaagaagggtaacttttaaatttatttattgaaatttagggaaggtaaatggtgtcgaattctagcccacacataacttaattttttctacaaatctacatgttttcctactaaattatccttttacatatttgttttattttttaaaagttatctttcctgaattttatcgaaaatgaagtacgttgttgttattgggggaatcatgagcggaatcggaaagggcacactcctgagcagcatcggagtagttttgcgctctagaaacatttcaatgtccgctgttaaaatcgacccttacctaaacttggacgcaggaactctttcgcctaacgaacatggagaggtacgtctttttaaatattacatcctcaggtttacgttcttgacgacggaggagaagctgacttggatttgggaaattatgaaagattcctcaacttaaaattaactagaagtcacagccttacctcaggaaaggtttatagccgcgttttcgataaagaacgtagaggagactatttgggaaaaactgttcaagtaacttttaaccattaattatcccatttactagttaaatatacttcatttagtactattttggctataattagtgttaacaatagctaagcatatatctgataaagtgtgtatatgtgttgtaggtagtacctcatatagtccaagaggtgatagaatggatagaggaagcttctagaaagaatgttgataggaagggttggcgtgatcctgaaatatgtctcttggaaattggaggaacagttggagacattgagtctgaggtgtatgtggaaacgatcaggcaattaaagctcaaactaggaaacgaaaacgtctgtttgtgtcatctttcatacgttccaattgtcggacgccaagacgaacagaaatctaaacccactcaacattcggttaaagtattactttaagcatcacttctactagttattcactactacccagtaacccgcagttgactaaataatttaatttttaggcactttcacaaagaggtttacaaccggatatgatattttgccgctgtatgaatgagttaacaagctcaactaaggaaaagattgccttttttacacaagtcaaattcaaaaatgtatgcacaaccccctattttacccatgactaataactgttcaggtcatcagtgtacacaatacatctgatttatatcgtgttccactaatgcttgatgaacaacatgttgcggaatccattcttgaagtatttttattacttttaccacacatttactacccagtttacatactctaccacacttacatattttacacagataacatacagatttacatatttgtaaatattaagcatagtaataatgtttgattagttgttgaatttcacaccgaatactgttgatccaatgccaattgagtattcattggagcattggagtcgattttgtgagaatccggaaaacgaatctgttacagtagggattgtgggaaaatacagtgcctcaactgacagttatttatcagttctgaacgcattaaaacactcgtcgctcgagtgtaatcttaaactcaacatcaaatgggtagactactcccagtttgaaggtaatttttgtactgttaattcacactttcagattacaactctgaaaaattcaaatctcattttaaagatctagacggagttctcatcccaggtattattttactacttccttcactagttttttcattgtttaatatttgaaagtttatatatttatagataacctatcatatagttatatagtaaacctaatacaccataactacatgacccgaatgggtaatagttacggatatggtagtgaattaaatataggagggtttggaacgagaggatttaaaggcaaaaagatggcagtgaggtactgtaggttgaataaagtgccgtttttggggatatgtttggcattgcagttgacagtggtggacgtggctgaggagtttgaacccaaagcatgtcacggcgaggactcaaagtcccctgaaaagtaccacgtggtaactttgatgcctgagttctcaggaaaggataaaaaaggtggaacaatgaggcttggagcacttgaaacgaagctggtaaaaggtacattaatctacagtctatacgaccagaacgagacgatagtggaaaggcataggcatagataccaagtgaacccggcttacgaggaaccattagctaagcacggagtggtgttctcaggaagagatccagctaagggaagagtaagtgtagttgaacttaaggatcacccgttcttcctatgtacccagttccacccagagtataaatctactccaataacacccagccccccgtatttaggcttcatccttgcttgtaaaaataggcttaaggaaaggcttgaaaaaaataacggaaagctactccccggatcatcctactaccactaatttacccctcacacagttgaatattttaaccgctttccaaactaatttatacataattatttgttatctagaatttcatatcgtagaatattgtcagtagagaagtagtgatgataatgccatagtgtgcagtggagcctgatagaagtaagaaaagcataaaaaatattttataaataatggaaaaaaagctaaatgggatatcagtggacaaaatagatccattggaccccgaggtaaaagataagtaccagttgttcaaggaggaaatcacccgatcggcgttattctcattaagggagaggattcctcaaaaaattctgtattttaactcactagtggtattttagcgattttatattttcatctcaacctttaggctgaaaactccaaaaatgggtgcattttcagctccagtgacctagatcaggaatcatatagatgtctggtaaaccatgatgtcgattccaaaaggcccaaaaggacccatgatcaagtaatttcatattttcatttttatttcacattattctcagaccactgacgtctttctaccttcacataaacaaatcttcgcagaactcgaaaaaatcaaactcgaagcttctgaattaattgaaattgtaccatagactactcattttacatatttcccattattctactacttatatcaccgttaattacttagtattctattcagtagcacttagtatacatgtgatgtaatagataagtaacataaagctgtggatccagttaaatgttccccgaatagaggacgggaacaactttggagttgggattcaggaagaagtaatacaggaattgacacgagttgaagatacagcattcaacttatacgacgctatagtcaagtattatatggcaaggtattttttaacactcacaacctaattttattaaatctatatcaataacattttctgaaatattctattatagagccaaactatctacaaaagttataaaatacccaaacgtggatgactacggagaggtaatttgatcacgatattcatttttctaggcaataagagaattagacgaaaaggaatggatacatatcaaaattaccaaagttgatatgagaaataactatagcatgttatatgatttactttgcaaggtattctatcctacacataaatataataccatatatactctcgtcaacatcgtagaaatagtatacctaaaagtatactatactaatagtataatcttatatatgatgtagaattgggaaaaggttgtgaagcccaaaagtgaggacgggcgatatcgtatgaccttttagccaattttttgaaaattcctctgaataaactaattttatactattttaataatacacattattcttaatatatccacaaaatcatggattctacagtttacgatttgttattccgggataaaattgaataaataaataaaattatctgaaaaatgtgcaaaataatggattttagaaatattttaaagtgcatttagaaataatatgtgatttttgagtatacaatgaatatatgtgtagtaagaaaccctatacacatcactagaattcaaatgtgtaaaaatttttcaatggaatcctgttaaaaatcaaggatataggcctaaactaacattttagtattatagggtaatttgttactatgcaccctggttcccttctcaatttaatagtttgttgttgagttattttttaatttagtgatttcatcttacacattcattaaaaatcaacatgggtaaaacaagaacacctttatgcggatttcgtcgcagaaacaagcagaaggaatccttcgaaaataacaacatggaaaacacaaaccaagaaaatgacgacgaactcaacgtaggaaatgaaaacctaaattatgaaaattataataataattatggagaaaataacaatgaaaataatgaaaataacaacaattatgagaatttcgaaaacaacaatgaccaacacatggatgtcgactcaggtgaaaatcttttgaacctagaaaacgaaaacttcgactacaatggaaacggtaatgaaacagtcaacaatgaggattctgagacccttaataaccttttgggtaagatggaaaacgaagaagttgacttggaaaacatcaagaacctatcacttacaatggacaacaacacagaactcacaaacctacagtcatttgtatcaaataagcttaccgaattactgaaaaagacaagtttgggagaaaaatgcgtgaactccttggcaccactttgcacaggccatgaacatggacccttggataaactcctcagcctgggaaatggatgcctacatgaaaaccataacacactcaacaacaatgagtttcaagtaccagaaaaggaggaatacagagacccacccactttaccatctggcatcaagtttgttgatgactttaacaaactacttgacagctgggctgatcaaccatcgcaaggcaacaataattacactgccaacttgttcaagctattcaacttatcggcactcttgaaacacttgggagacccgcgctacgtagaaattttgaacaaattaggagttaacaacttgctcaactacccagacaccaataagaaatgggaccaaattcttctcaactgtgaaaacacaaatgagaaaatggagtacgctaaacacccactacctgacttaccaaatcccaaagctgtttcaaattgtaatactaagttggttgatttaccagagctggataacaacaacgttgatgaacatgccttcaaactctactgggcatataccaacacttggctcaacaagatgtttggcccatcacttcgcaactcacacaaattcgtacaacctactaaaaattggtacatgaacatggaacgggcttcccagttattctttttaagactctcaaagacgctttgctctacttaatttaacatcaaataatctcctactcttatccatatatttttatatacaatgaagatgactagtactaagtaatttacatatttatgaatctgttcattataaaatataatatttaataaaggaattttcaacatattttgtacagaagtagaatgtatgataattcgtaattcatggtatggtatatagggtataacggtagtattatacaaagtatacgttatctacgtaatatatctaaaataggcatatatactaatagcatatttaaaattataaaccatgtaacgatttgagtttaataaaatgaatataccataacatatcagaataccaacaacgatattctaatagcttcctgattgaggataataactactgtgatattctaatggtatatctaaaacccttagtagtaagtattaggaaaacccagaattaatatttatcgcataaagttaaatgtcagcttctcctccgagtggagaaaacacagacgatgatgctactaagaaggtcgcatatgctttggttggcttctcattacttctaactcttagggttggtatgaatggagctcctttctccataaaacgatttaaaatacctgagcatttattcagtctttacgtcagtagagttcataacgcaatagaacttagtgggcttgttggcaatactcttggcacaatttatacctttatcaaaaaagaatgtgaaaaggtatctataggaattcactggttatttttctttataaatgtagttctattttttgtatatgtgactggtggtgaagagggccatctaacagatttttactgggcgttggcattttcggcttttgtatatggaatgaacattcctttcagtatgaaattaggaggagataatatagtttattttttagccaccattcaagtctctggtatatttacttcagtttatcattttatatttttgaggttatttggtaacaagaggaagtatgacactgattttcatattattacttggcagctgtttttgtcaataataattacaggagcatctgcttcagtttggacaaaagtctatgttggtaatggcggtaatgaaactgaaaaatgtggtaaaaacgaagattctagtggtgattcttttcatgcaatatcaccgatgataatgtgtatttttgctcagggtgttgtgtacgttttttatccagctatagcaccaggtctactagtggattttaggcatgtcaataagatagatcaggctcttcttattatggcacctattccatacatcactatagcaattctcgatgcaaccaatgaaacaaaggtttactcacctaagaataaatgggaaggtggaaaggagtattggcatggaactttgctatttattccagtaatgtgtatttgcggatttttatttatcagggcacttcactatccctattcaggagcatctttagctattgtaaataaacctggtatggttggtttccttacaattttgttttatgtaagtcatatcgtactacttgctgtaggatatgctggtgtagggccaaactggaattctactggttccactgtaaacggcttccttaccaatttgtctatgatactactgatttttctggctgagggttatattaatgaattcaaaaaacatgatagagcctattggccaacaactggattgtccaataggagggcatttggattttggtttgataaagcacttcaaaatggattcaaaaatcttatggcaatattcactcgtgatcttagaagagatctgttgtcagcacttgactagagtcagtcaataacaattttaatgtactatataaataatactatactaattaatatataatactaaaaatatataacgaggttttaaaatctttttactcaaaaaaaataccatttgtggagataagcaaaatcttattaatttgtccaacatagtgtgtaaaataaaaatcattaacttaattatttttttataacaattgtaaaattaagaaagttttatagtaattaaattaaataattaaaattatatctaattatattcgaatatttcgagagatctagacaatttgttgaaaaacataaaaattgacattattcaattgtaaatatctcttaaaattatcataatccacgatgatactacttctatagactatttagtaaaaaatataaaaatttagagttacttaactaagtataaaaatgtcaggaccggagagtgagtatctgtaaaaaaaattttttttattgaaacgattaaagctttttctaaaattttaatatattaaagacagatgtataagaatgctaaatatctaattatttaaaattttagactaagatttcgtgaaaattttaataaaaatttataaggcttgttttggcctataaaccaaaggtcaaaataaaaaataaaaatttttaaaaataatcagaattaaaaactaataggtaaaaaattaaaaattaattctgaaaataaaaatataattttgtatataaaaaaattaaaaaataaaaataaaaaaatatattaaatataaaatatatttatataaagaaataaaaatgcgaataaaatgtattatatatatattataaaataactaaaaaagaaagtaaagattgtatatataaacataaaaataaaatatatataaatataaagaattaaaattataattgaaaatacaaaatatatttatatatatatattattttggtattaaaaattattaaataatgtatattaaaaattaaaaaaaataattataatatatatatatatatatgaaaaattataattagaaaataataataatgaatgtaatagatatataattaataaaaaataatataataattaatatagatagtattaaatattatttaaaggttaaacaaaaaattattatatattaaaatgaaagtatatgttataaaataaaaaataaaattaaaaaaatatatatcaaaatttgaaatttatatatatgataatgtatataattttagtattagaaacaaattattaatatatatatttaaacaaaaatattgaaattataaacaaaaaaattaaattaataaatatataataaaataataaaattaagataaaacaaaaatatattaaatatataaaaaattatgaatgcatagattataataataatatattaaaataaaatgatataatatatataataaaaataaaaatatttttataatatatatatatgtacgattaattctattgttaaaagaattaaaaaatatgtatattaaaatagaaaaattatatgtgttataatgaaataaaaatataaaatattattttgatatctattttaattaataatgttcataatgaaaataattttattataatgtaaataaaaaatatatttaataaatttggataatacatataatttaataatactaatcaataattaataattaataaattaatatataaaagaataatatatatattaattatatatataataacataattgaaaataaattatattttaataattataaataaaaaattaaattcaacataattatatatattaccaataaattataaacaaattataataataaaattatatatatataaatgaaatgtaatatactatttataaattaataatataaataaatataattaaaaaaattataaaatatatgatatgaaattatattaatatttgagttataaattacatataaaaaattatattaatatatatataaggattaaaaacaaatatataaatatataattacattattaagtatttattataaaatatcatcatctaaataaaaaataaatacatatatataagaattaattaataatatctaattcatttttttaattaaataaatatgttatatatttaaatatatatcgataataaatgattaaaattatatgtcaaatgatataaatttactatactattaaataattaatataatttatttaatattaataatatatataaaatgtaaatttcaaaaaattaaaaaattgtctatttgtacatgatataattacgatatataaattaaaataattatttattatatttattaaaaataatttttatatattatatattaaactaatttattttcattaatattttaaattcaataggtatataattaatttattttattgaacatttatatattaattataatataaataaatgtatttattaataattaatatttatttatttttaatattatatattatttttttaattatatatttatttattttaattatttatttatttatatatatatattaataaattataaaatatttattatattcgtattatttttttaatatttatataatttatatttatatataaaattttattatacattatatcattcaaatttattttataattatatatttttattttatataaatatttattttatattttatacataaaatttttaacattttttacacatttctacattattaatatatatatatttaatttaaaaaatattattaatatttatttaatattaatatttttctgttttttgaaattttaattattattttaaacatttatatatatttatatttttataattataaaaatatgtgttaattattattattaaattatatttattatttaaatttatttaatatgtttgtcatttattttataataatattatttttattttttataatatttatactatttattattattttatatttcaaaattaattttatataattttatctcattataacatatatatttttttattttaatatacatattttctaatttttttaacaaaaaaattaatgataattatatatatatttgaaaaaatatttttttatatgtttctatataagataccatttctttattttattaatatcatatattttaaataattaaatataaaattattataatatatatttttataaaaatttttatttatattaatttaattatatatatattctatttattcttattaaaattatatttattaatatatatattaataatctgtttctaatactaaaattatattcatcattatatataaattttaattatatatgtatatattttttactttttattttataacatatactttaattttaaaatataattatttttagtttatcttttaaataatatccaatattatctatattgacatattatattattttttattattttatattaattacatttattattataattttttaattataattatatatatatatatattataattaatttttttaatttttaatatacatttttttataatttttaatactaaaataatatctataaatatatattctatctcaaattataattttaactttatttatttatttatatattatttttgtttttatatatacaattttttttttaatattttataatatttatatataatacattttatttgcatttttattttttatataaatatatttaatatatttttttatttttattttttattttttttatatacaatattaaatttttattttcagaattaatttctatttttttacctattagtttttaattctgattatttttaaaaatttttattttttattttaaaattttatttgaacaaaatttctaccatgtataatatatattcagaatattatgtaatgtattaaacattggctctatttttgatataaaatctttagtgttgtatatttcaatttcctaaacaaaattattatctttatataataccatatcttttaaaattttataattttcttcattctcttgaacaattacatttatcctataattattaacctcaatgttttcttaccatggcctttgtggaaaacgttcccttaatgttgtatagagattaatttgatcatttaaagagttactacttgataaatcaaaacaaaatataactcctgaaggtaaatccttcaaagcagaatactaaaaaataatgaacaaaatatcaactcacagttaatttttcgtaagaattataattcgtatgaccttgtcgccacaataatccaggtgtatctattatctgaccttcaaatatgaaattatttactttataagttaaaatagataaatttattcctctagtagtgaatttatagttggcaacctttccctctttatttagttttttgaaattatttttgagattagaccaacgtaatccaagagagtctgaaataatctcaacatggtcctttaaatcacttaatattaagccttgtgataatttgttgaataaagttgtttttccaacgtttacatgtccaatgattgaaatgataggtttttcaatatctaaaactggtaaacgtgataaaacagtaaaatattgtttatagtggtcataaagattttggaaacttgaatacagtgaatccaattcaagtacattttcctttacgaaattaaacgcgtctctactcctctttattttaccaatttgtttatttatatcattgcctctgaaaattatctgtttttttgccagttcaagttcacccataagattatcaaaaggtatcttggatttcccagttgaatatagttcatacaagcatgttttcaacatggtgtattgaaacgggtgaatatacttcaacaattgcccataaaaatttgtgatgtttttcagtggagatgtaattgctttaacatataaatcaagctttactttaagttcacgaataattctcttcttggtgtgtttcaatgtatgaaggccagtaaaaactcccggtagaatacttttaacatctttaaatggatcttcttcaatctcagcagtctttaccttgttggaatcgaaaacactcaggtcacatttagatcctaccttgccctttacatacgcttttgacctcacaagaaatggtttagtatctacaatttgtggcagctttttaaagagtctctttacgaaaagtctcttcgagagagagtaaacagtttctccaagtaaaaattgcctatccaactcatcttctacggtcttatcaaaactttctgaaattggctcagttttatcaggagattgatcagtcttaataggaacagtcagatccttataaaggtcagaaaaatctgaaaataccaacgtttcacccaaattttcaataggagctacgtccggaaatatatcataatcttctttctgtacttcactggtggaaccaacctgagtagattcttgtgcctgttcaagagaaaacaatccattacatatatatttttctaataatacattcttgttaaagttgttatttaatcctacaaatgacaaattatacttcctgcttggaattaaacctttatttacatttgttttaagattatttagtgtgtttctaaggttacaaattccatctactattttacagttatatgcgatagataccctacttataactgtgataaatgataaataatttatcaataggatcttcataaaacaaatatcatcctatagtcattaattttggacttcctcaataataatggctaagtaaccagaaaactccaacacatttcttacagtagtacaataataaattattctattcataaattacgtttatgagtgagaatctgaaaatttaaacgactcgaatgttcgactatggtgaaataggattccactatttactctttatatttccataataatagtcttaaatttatgttttgatttgtaaaatatatttttatgttgtattatattaaataagttaaataaattattatttttttaaaatgaagtcctcctctcaggaaggcagatctttctcagaagataagattaaacaaatacttgacatttattcaaccaaaagttgggacaaaatatcctccgaaattcccaaaaatggacttaaagttccaggaaattctcaaaagcttccagtttatgatgtttgtaaactcggtcgagagcttatggaatccttatccaagaaatacgtcactatcgcatgtaaaaacgattcagaggaacgctggctccacatttctgctcaagatccctttatttataaaggtttgttcatttttatccctaatcaattctacagaaggtaaaaagtcttcaacattttctgataaagtagactctatggtagttttaattcacaacaactgtgttttcaactggagaatgttctctgaacttatgaaactagttaaaagtgaaaagttaagagtcaagtcaagttgcactgatctaatctattctgcttttatggaagtgttgcctggccgtaaacttcgttacattaacgagattaacaaggaggttattgattttttaggatacaagttatttcacttttcgaaaaatcaaaattcttgggacactttagagttggaggtggttaatttactcctgtccataacttttgaggattatttaaaaggaatttactctacattcattcaggtaaactattattagaacatttaaatgatttaggagctttcagatgtgatgaatcgaggagtagatttcttacagataaaggcttccaacatagcattacaaatgctaatccaaaaacctgaacaggaagaaatccttcttgatctaataatagcaaggttaagccataaggacaacaaaatgtcttcttatgtgtttaaaatgcttgatactttgcttttaaatcacaaaaatttgaaagggattgtggtcaaaaagatattgaccaaggttaaaagtctactgcccaagttacaatgtgaactgggtaaaggttctccaggggtgaaagtatcgagacgcaggaagaaaagaaggaaactgaccataagttagttttttattataaacattttcatagacaatgaatccatacaaattctcaagaccatctatcgctgtacactatatatctcaaaactacactacgcaaagtaagattatactaaaatataaattgttaggtctgattattctattgtaaatgttattttaaaagacttaattgatattttattactatttataagtcagaattccactaacaacgataagaacaccacaaatgatgctaccaaggctaccaaaggcccaaatgtactactatgtaaatacgaggaatgtgataagataataaagacattattactatttattaacaaactattaaattattataagaatactgatgtttattctcaaaagaaatcactattcaacagcggagtaatacaaaacttgtatgacctttcctacaagacaaagtccaggtcaatcaccatatcagcattagttttaatgtatcatataagtccaaacaggtaaaaatcttattatttcaagtatttttagtgatgaatattacaagttactgtacaataaggcgttcaacattagactttatgagtccaccagtgtacccaagttcttggaactgatccaacaaatactggagaagaaaaatccaaaaaactccatattaataaaaaaacttttacaagttagtttaataacaacaatttaattttaggtcaccctttgcaattgtaacagcaatattaacagtgatattatcaacactgtactaaaaaccactaacaatgttaggctatactcaatcatacttatgttctttaggataactgctgggagcttagactacacaaactatcatataatccatttatcatcagtacacttgaacgaaaatacaataaggatgatgagaattataatttatataatgaattgagtgtgtttagctcatccctacagctggactacacacttgagaagtattggaggaatcgtcaaagttgcaaattacaccaaaaaccatttcaactatactatcaatcaaagttaaatctacagaacataaaagattctcattcttttgatggtattagtgttactgatgatatcactgaactggatgaagatgagcctagtgaggatttgagtgatgtggatttaactgaagaagatgacttaagtgatgattttacagatactgacgatgattcaactgatgaagtagatgaggatgaatgaaaacaatatattacattacttcttttatgtttagtgtaattaatttgaagggtgcattatttgaatctctatacacagctacgttctataaataatttaaccagttaaatattaccagtagtaattgttttttatcatttcctgatacaatgacatcgccattgaaataattattggttaatttgccttcaaggtttctaattgacaggtctttcccgatgagttttgtaactttggtgttctccttacaacaagtcttaataaagtttacacatggaagagttttaattatatctacagacttaaaagctccaaacgctaatgtacagaaaaaccctagcaaaaatactgttaaagtagcaatcccagcattgtttcgggtagggttacctgatgtgcaattaaagtattgagatattactttggaaagttgtttttgaggttttggtatgtatccattctgatgtttgagactcctgaacagtttaaatcatgtgtaaacttactttgaaagggtttgaagtgaatcctaggagcttctttttcagcaaatagggcttatccttgaactcttttaaggataaaaatttctacacattgatatataatttgttccttacactcattccatctttaaggtttttagacttcatgtaaatatattcctatattttttaattagagtttaacactacctttgtttttctatcctctagaatagcccagaatccataagaatctaattttttcagcttcaaatccttatagttatcctttgtaagtgtaccattatcagatatattctatttgtaatgatatataggtattatttaaaatttaacaaaccttctgggtaatatatgatccaataatgtcaccagagtttctaaaaaaattaaaattatgggaaattacctatcaaaaaaacattttgaggactgaaacagtgcaaaaacactgagaactgctaaattacaatatttataatcgaaacttctgagattatttatgatactcatattttacagagccctaagattccataagaattagggaaataagaaaatgtgaaacattaccaatatcatacagataatagaaagaaaaaaagtgagttttacatacattctttccctcaaaaaaattaccatactaaatattgtcaccacttaattgttggaatcacagggaatagattgtaatatactatggaatctgatgaaggatacatatataaatctccttctgtagtttggccccaaaaaggcttacttttatacggatctggaacagttttatacgttttcgactacaagttggttaatttctacacactgttaacttagagaatccaaattatccaaaaagttacaatattctgagccaaaccaatttgttcggagtatttatgtatgtgtaattttaaattaaaaattttagattgacgaggattcagttgtagttgggtttgataacaaggtttttaccgtttatgacagctcttttaacgtattattaactaggtaggattattatttaatattctattgatatagaaaatttaataaaaaaatctcatttatcgcattatctgagggcaatgtcattatctgtgatttcttcggggatgtttccattctgaaattggacttggattctattaaaagttctaaaaatagaaacattgactcaaaattggcagaagaaaagaatattaaagcatcagaagataccactaggaacaaactaactagtggcagtggagatgtaatcgttcccttttctcattatagtaccataacatcatcagtatgtttatcacccttattaatttctcaattttagttgatctacaatgatttactgtttactggaaataaggatggaaagatattcgtcaattctttatcaaatttgcacgaaataaagaacatttacttatcacacaaaatgtaataaaacttttaaataacgtcttttaggtcaattagttgtttggatgtaagggaggatttgaatttactactttctctatccattgatgataccatacggttttggaatattaaaacaggtttggaagtgtacaggattattattgaaaatatgaaatgcttaagttattactttaaaactagaagaaatttgatcattctgctttgcttggacgagattcttgtaatcaatttcagttttattaaattacaattacttggttatcaagtgtacaaattacccttcacagcccaaatgtgtacatttttagaagatacgctgttcataattgacgattattcaagtttatacaaaattgacagtattaatggagttggtacagattgtaaagtaactgggaataaaatagcaataccagtcaactcaacagtgttggaaaatgtagtgtgtatttacaaaggcgacaataaatgcaacaagataaatattaaaaagaatgttaacgtgtaatatataattctaaaacatttaactcctctttaagattctttaacaagttgtttccatgtaatttatccgatttattttcatttagtatttttttaaatttattacccagttcacttttgtattctttagatatctaaaagtatttagtaatttgatgtattaccttgttaaaatttaatatatcattgtttaaatttgagttgagaaagaatttgacaaaatttaaaaagaagtatgaatgcagagtgtaaaaagtctccagtggttcagtgtcgttgttgtaactgaaacaatttagtttcccctcattgtaaaaatcaagaacccaagatgtgacattaatactagtaagtgtaaaagggaaccaattttgttcatttctagacaattctaaggcctttcttgaggtttcagggtaggtctcaaccatccattcgagtgataaaagccccaggaaaccagttttcctaaaatcagttaacggcatttggaaccctaaacacccccaactattaaaatcatcagacttgcaaacatgcaaagactttggaagctttctgttttccagaactttccaaattctctcaaaatgctaaaagtacacacattagtattaatgtatttggattatatttatgtgtattaccttggcgtgggttttctctgagatttctactagacaagtttcgtcaaatttctttaaatctgaatagaatttacacatttgtacaacagaatccaaaaccaaatgacgatatttagagtctatatccagatttttcatcaccaaatctgtaattctttcatgttcttttgaaccactttgtatttcagaaaatatctaaaaaacattaactgtgtcaaataaatataaaatatgtaaaaaaagatacgtatggattcagcttttctccacaatgagcctggaattcagataaaactttcgggtcatgaactttataactgacaggttctaaatccttgaacaaagaaacgatgatatcaaccaaatcaaggtcaagaaggattctttgagcttgagaggttctagtcaccagactaatcacgtaatcataaatcctggacaacataattcatttccaaaatgaaaatagtgtaaaataactcaaaactaaactacattctttgtaaatccaccaaattaacccccatcttacactcctgccttgtagtattcaggaagatttatttgttcagtatataataaattaatttattatatacgatcatattaatctggaagttcagttaagtatttattcacgaatacttaggaattccataaatgtgtaactaacaatcataatttggaagatcaccaaaatcaaacatttgatagttttttattttaattcttgccattttaactatgtagataattatgttggtttattattttcgtgaataaacatattggggatataaaggtgtatattgtgggcatcacttttgaaactatactcactaatatatttcttaagtttgtatgattaaatatgcatgtccatacacatcggtatatttattttaattttttctatttattctcttaatgtaaagtaaaaatttttggatttttagcttttgtctcttacgttctttgttggtttctaaaaccactaataatttaaattttgtaagatatatcgcataatttaaagatttttccatacttctattattccttttcttaccgttcacatattttgatataactgaaatgtgtattaaagtattctcatatttattaaaattcgccgacacatttcaccttatttttcagattaagataatttaagagtttctaacaagttaatgtacaataaagtgtgaaatatctccgaatttgcagtaaatggatgactcttccatcaaaaggttcaaatcgcataacgtatcctatagttttccagaatcgaaatctgattccagggaaacgcttaacagttacaaaaagctcttaatttctgataaacggagcagctatagggatgaccatacaggcctaaatgatacaaggaaaagagctgaagcccctgataaagcccatagtttatacctcgggacaaaaatccaaccagcatgggaaacaagaaccctgaaaataaatccagtaaccagtgatgatttgtctcggttcctgggaaacgaacatcacacccaaaggtggtcaataattagtcaaattatgttcattttgttatataatttacgtcgattgccgtttttgtggagtatatttatatttttatgtgaagttattgcaccatttatattgccttctggagttcctagaagagcctggtactctagtgcaattcccttgttcgtttcactgtttatgtccatttttgtaaacgtcctagagtttacaaagcggtataacttgggccgattccttgataacaaaaagtgtgttttgttaaaggacgggaaactgtcaagtgtaagaagtggtgatgtggctgttggtaacatactgaagctaagctgtgatgagcaggtgccagcggattgcgtggttctttataccagtaacccagatggcgccttataccttgacgcatgttaccttgatggtcaaactgaccttaaaacaaagtacagtataaatgactttaaaatcgaatcttccatacgcagttataataatttaaagggtaacattatttgcgacaaaccatgtcctgatatgaacaagttttcaggtatttcccaccattatatatgttgtaggattactgaagataaagggttacccaagaccttgtaacataaccgttgataattttataatgaaaggctcaattttgagaaacacaagttacgtatatgcagtggtggtttacactggcccagatactaaagccagccagaacttcctgaggattttaaagccaattaaaatcggatgtctggagcagacgataaacggaatctccatattcctgggccttatttatgtagtatgccttactactagtataatcgtgaggtatgtaacggttttaagaggtgttggcaaattcagcaaaaacgtccaaagcccagtcaattcactgctgtttatcattttcagattcacagtattgtattctcccatcataccaactacacttcccgcaataatggacctacttagacttctatactctcccttttataacacttactccgacagtataatcaaaaatctgaacaaaaaagagccaaatgaggttaccggaggtacttggactctgaacagcggtttatgtgaagagcttggacttgtggatttcattttcacagataaaaccggaacccttaccacaaacaatttatcaataactcttgtcactattcttagtaaaagttttacaccaaaacagctggtacagtcatatcagcctgcaagttcttctaatatctccactaacggccacaccccagagaaagttaatggcaaatctaatagagaacatagtgaggaaagtgaacactttatgagactgttgtgtatatgtaatccctgtttaaacatggattcggaggatggttacaactcatactcttcaggatacaagtcgaattattcaagggcttactcctttaaattgagccacttcaagactaaatctttcgataggtttcactttaatgattcgggtgagaattttgatgaaaacccccattccgtcaacttggatgatcattttgatgaaaattctcagggtgtggataactctgtggaaaatgaagaggaggatgaggtcgagaacttgccgatgtataaaaaaaccaagagtaaagcacattttggtaccgtttcatatataaatgacgagaacgtatcaaaagagttgtttgacctgagtaacagagagagtttgaaggaggagcggcggtatttgacgtgtataagtaaggaggatgagtgtatggtaaatttagccaacgattgcggttactttgtgtctaacaggacaagggataggatatctgtgaactgtaatggtaagcatgtgaactatgaaattttgggagtgaacgagtttacaagtagtcggaaaaggatgtcagttttagtgacaaatatccaaaacaatgagaattttctctacatcaagggcgaggcttactcaatgttgtcgattataaatgatcaaaatacaaaacttgcaatagaaagcagattgaaaaagaattcaatatttggttacagggttataatttgtggttacaggtccatgacatctactgaggtgctagagtacgagtcatctgtcctaatgcacagggacggcttggacgagttatgttcaagatttgagaaagacgtgaattacttgggaataataatgttccgcgatgaaatacagcgaaatatagtgaaaaccatagacttgttaatggattccggtattaggatttgggtactaactggggataataaagaggccacaatacaaacgtgttatcttacaaagttgctagtggtcccgactaacatattcattattcagattaaggatttgctggctgattcgattaccccaaagagaataagtgactccctgggcagtgatactgacaccgtgactgacaaaattgacatgcttgttgataatatatataacaagtatatcctggagcggaataacagtaatgaacagctatgcctgattatagagtctgatgacttggagattattatgcaaggtaacaagggccagcagattttcatgaacatggcctgctcatcagatgttgtaatcgggtgtcttttaaccccaattcagaagggtcagctggtgcaaatggtcaaaactaagctcattccaactcctataacattatccataggagatgggatcaacgatgtccaaatgctccaacagtcacatctttcaatttgtatcctaaacaccgcctcagatgcttccaataataaaaagaataacatccaatttggaggtccctcaaattcttttaacgccaataacactcgtactggtaaactaaatgttaaactaaatgttccactaaatggtccactgaatggtgtagttaatggagtgcctgataaggataacactcctgactctgctgacaagaacgacactgcagaatcctcagaaactaccgctaacaggcaccaggataaaggtttgggcctggaaaagagtgtgtattcagacagtttggacactaatgagaagttggtgataaacaatgacataattggttactgtgacttttgtgtggacagcttcagtaacatcagggagcttttgtttaagcagggcactaggatgctgaagtcaacttcactcattatttactttaccatttacaagggacttgtttttatactgccgattttttactaccagatttttacaaactgggttggacttgacctctacgggtcactaatcactatcttataccacctcgtcttcacattcatacctctcatcatgttcattctcttttaccaagacatttcatacgagatttacaaccacatttcaattctatacaccatcagtattttttactcatttatcatacaatagttaattttatagtatagttatatatcttaacatacttattcagttaataattttatacatttaagtgtgtaatgccctaacttataactatctataaaacaactatttaatatatgtttaggcaggagaagaatatatttgaatataaataatagtttatattggatgttggagggtattttgggttcatttgtgaattatttaccgttgcatttactggtgataaacaacgacaacatatacaagagtgaggttataagtaacagaacctttggacttctgattagcgtgtcctcaataataatcttcaacaccaagcttctgataaattatactccaaacacggggaatttcacctttattagcttgttgtactattttgcatcaccgccgctgtatataggcttagtcctagtctcgagcaggcgttctctaaggttatcgtcacagcaaatactcagaattatacccttttacatcttaattcccatctggatcactttcacagttatcttaaacattctgtcaaacctgctccagctttatattctccccaacctcatcaaacacatcaaactctacatcatcaacaataacaacaccatcaactttaaaagtattttacactcatttccctttttttctcagttattcaccgtttattttatttactgactatattctcagtttttcactgtttattttatttactgacttatattctcagtttttcaccgtttattttatttatattctcagttattttcgcagtaattattcattcgcattttagtataaatttgtagatataaagaacattttcaactttaagaacattaatataaagaatttgatgccagtttcgcggccgtttaaggtgaagaatatccacggcgttactagtaaatttgagtgtggagtcactgagaataacataaataagctgataaacatttatacgctgaggttcaaggatatacagctggagtctgactacaggcttgacaagaacaagaaacactactacgaaaacggtcactggtacaagataattttcattttactgttcttgtactatttgagcagctttgttgttgagtacttgatccagaagcggtggtttaaggcgccagtcatctactgtgtaattcccacagtgctgttggaaattgtgctcgtaatctgcatcatcatctccttcaatcacaggctctttatcaggtttatcaaccacattttatattcgctggtcacctttatgatcgttcagcatgtgtcaaacaggttcttactcaggtcaatctcctggcttcacacagttctcttccccatcttcacctttgtcattctccgcataccattcatcatctccgtaggactcaacctcatcttcctcatcagtatctcacaatacaatgcaattagttatgcaattagttatgtagttagttatgtagttagttatgtagttagttatgtaacttagtaaaaggagtagatacgtatgtataactggtaacagttaatagccccgtaacaccgttttagacacgttaatatcgataaatagtacgaatattcatatactgccgttgttttttgggattaacatattcgttggatttgtgggctatgacttggagtataaatcgaggagtaacttcataatggagttttcggtgttaaattacaggcagaagcagagtgagcttctgaacaccatgttaccaaagattgtcgtctccaaaatgatcaacgctaagctcaacgaaaacggaattccaatcggttttgaggccgagagacatgaaaacgtcactgtcattttcgcagacgtttataatttccaggaactaattgccacaattgagccgcacaggctggtggaaattctcgacactctgtttctatctttcgaccgatgttcgaaggagtttaacgccattaaaatcgagacggtttctgagacttacctcacctccatgggcctaaacacctcttcaacctcgcaaacaaagtccctgggcatgacagacggccatgatcacgaccaatcgaggaataaaaagtctggaagtagcttgggcaggagaagtagaaggagtaaagacattgcaattgacactgccgtaaacaaactcgacgcctacgttcaagccgcgtcctcatctctcgacatgtccatcgccatgctccaagtcgccacaaccatcaaactcaacaccagtatcacaattatttagcttccccttacggggtgcccagttgtatattttacacagttacttattaaccacaatctagtaacattgttgtagatgagagtattggagttaagattggtataaacagtggctatgtgattagtgggttggttggaagtaagaagcctcagtatgcgttgtttggtgacactgtgaacactgcgagtcgtatgaagatgactggtgaggttggccggattcacatttctgagagcacctacgagcttgtaaagggcgacaaaactctggagtttattaacagggagattgcggtcaagggcaagggcgtgatgaatacgtacctcctagaaaaagcgctgggaacaagttaccccaacttcagtaactccaacaataacctccacgaagttgacatttactacaacatgctgaataagaattactccgcttcagcatacggtgacggtacttcttcctctggtgacactcttgagaacattcctctgagcagcagagaactgaatgttcctgaggtatcactcactgatgatgagcttaacaggataaagaacaggagaactaacattaacagagcagtgggaaacgaagatgatttgtacgataatttgtacgactataacactctgaacaccagctactcctccaatgtcacagttggaagtcacaagagaaagtgcttcaaatttaaaaggcactcatccttcatgagtaaatcaaccagcatgaggctgacacgcaagttcaccagtagacttggcactaaacactcgtcgttttccaaaaacaggttcagcgtacactcggccaaaaacaccagcataggaagctccagcatcgtttccagcctctccacacccaaggaaaagaaacgcaaatctgatccctcacacacactcaaggaaggtaatcacactattcacactattaacataaatattactattcacactcactatagtattaacataaatattactattaacagtattactattaacactcaaatattactattactaccggcaatacgtattggcgtgagaaaatgtgcagatgagatacatatgagaaagaacgagagtatattattgaagtttaatgataagttgcaagaggacagatacaggaacaacttttacaacaacgtgaataacatttcgatcaacgaatacgcactttttattttcctggtaatgttacatatgataataaaattttagatcaccttcattgtccagagtataattaacgtaaatgtaccccggatatatgtccaggacaataataagctaattgtatatttgaactatattctgtattggactgtccgatgtttctttatcctaatgtcgttcatactgtggatgctgttccactacaacttttttatacagaacaaggaggataataagaagattaaggtctgcaccttctttgtaaatttacttttcgtatccgcaacctgcatcttcgctctctccaactcctggtcaatcaaacgcaccgaacagtatcgcccatccaattacttatttcaactcactaatctattatacatattgaccctatgtcataatggctgtagtgttgattataatttatggctgaatagtgacagtgtcgagttttacttttacttgattctgctacaccatagcaccggaatgctgtttcaaaattgtttactcatcgactccctgttcctggtactctcaatgaccttcatctcatcctcggtccaaaacaacgaaaacaccgtcaccgcactcttcaccattccaatctgcgtactattcaacctactctccgcacactgcaaagtaaacacacagctcacccagctatatacttaattactcaactatttatactactctttatactactttttagattagttaactattagactactctttagattagtcaactctttacattattcaactagattattcaactggattagtcaattgtgctatatataatattgaaagttcaatgaaaataggagtcgattgaccgtaagaagtattatacgaatgagaaggcgtatatgattgagacgaggataaatcagattttgagtgagatgttgccgaagagtatactggaggagtttaagctggagaggctaaagatgtgttacattcacgagaacatgtcatttctgttctctgacatcgttggattcacgaaatgggcagagtccgttgacccctccgaagtcattgcactgcttcaaaagctgttcgccaatttcgaccgcaacactaccaactttaatctctacaaactctgcacaatcggcgacgcctacgtcgccatctcagaacccaaagtcatcggtatccaatgctattttagccaagcacatattctgtaaaatatataatctaaccaatggagttaattttggcttagataacaaggacatgaggatccaggacctcgagaatatactcctgatggcctattccatgatacacatcatcgacgaaacaagcaaaatcttcagcgtaaacttatcccacacattataactattatacatattccacacatattccacatatattgtgaattattatgatattgctggtgttgaatccagtgagacacgttaattttgggttagataccggatttgaagatgcggattgggttgcattatgggagttgtattggtggcgtgattggttctggtaggcttaggtacgatgtttggggcactgacgtttacactgcgaatatgatcgagagtaacggcgttcccggcgaggtttgtgtttctgagaagtttcgggacataataacacgacatttccccaacaggttcaagttcgagcatcacaaagatattaacatcattgacaaaaccgtcaagagctacatcatccggaataaatccaaggaggctatgcaaaaatctcctttttctcagatgaattttgcagatgccggcaatgtgtagtgcgaaggtgaggtggatttacagccagtttttgaaactgagtgacggggagcaaagtaattttttacatttataattacatttctatttagattctctacgattattactcgagagtaagctgaaattgcccgaagattcaaaaattattaaaatcaagaccccatttcctcatcccttgttccttttctcagagtttgccagattcactcggttttttcataacttcacacctttagaagtttcaaaaacactgttactcctaaagtgttttgaacctgcaaatagtcgtgaaatcactaaaattaactaaaatgtgcggcttacacattaactgatttacactatttatccttgcacatttcactcatttagccacttttgaaatgaattgtaaaaggtattgttgcctggcaactggcctcttgtttgccaccgtttttctgtttttattcggcttcacctttgaaggctgtaaccactcctttgccactttcctatccagaaaactatatgaatacgttttggacctgtataacgatgacactttcgctttatttctgactcttttcagctactttgggcagtttctggccaacatgttcttttacaagggactgccatcaaagttttatctccactgttatcctctgctaggtgataattacctggaaactgttctggaacccttacccgcaggtgccgtaatggcctttaaaagattcgtcggctggttctataaactctactggacccttttaaaacgacagtttagttacttttacgttttcggattctttggagttatggtctctgtacggcttttactccttagcttactattactctcactctggttcgctgtaaaatacttcaaacatctgctcaaacactttagattcaagatggcactaccacttgtactttttccctcatatcttatggtactcgtagtctaccacctcacctacgagtcttttttcacaccacttcacctcgccgcatcgttactactcgtaggaaccctttcctacaataaattcaaacactcacgtcactaatcttattattcataatatatgttatctagattagtaggttagggtataggagggtataggtgggtataggagttggagttgtgtaggattgaattgattagtatagaaaatgtttaaggagattcaggttaggattatggtagggataagtataaagtgatatggaacaatatctaatcatctccttgtcaagaataagacttatagtcttacactgagcattattgtatgcagttttaagtccatcgaatttagtttcaacttcggtatatttactttcttcactaccattaagagtacttttatattgagtttcttttgctttaactttatcgtaggcatctttgacggcgtcgtacttactgactacttcttcagcctttttaacaagatcagcattatcactttcagtagcatctttaagtgctttaagagccttttggagaccttcaacatgttcactggctcctacagcagtagcaagtgcttcgacaagtcctttaagttcattattactagatagtttaggttcagtggctagtaagttggctttactatataggtcaacggccctcttccaaatcttagtatcagcactaccagtaccaacttggtctttgagtaggttagctttcttgacattgagcatagtgttgtagactttcttaagatcttcgtaggctttatcaacagccttgaccttctcattatctttatgagtattgtaattcacattacttgttagtttaacgtattcagttctgacatcttcaaacttagttattacttgaccagcattagtatcatcaggactcttggctagttcttgtactttatcgtataaactagtactattattatttttggctgcatttttaagatttccggcttgagtactaagtccagtaagtgtactatcttgagccagcgtgttggctctacactggagtccacctggaaaactactcaactacaacactagaaatcacatatggatgataaaacattatgaaagtaatcttaattctatcaactgtttctttattccttttcccagcaacgccgatgctattacgcaggctcctaaaacaatatttactctaccactaatacacaagtaagtagtcgagaagtaataactaagtataccaggggccaaataaggaactaagtagtcagataactctgtaataaataactaagacccccggagggagataactacatacaatagaggattaactagataaatctgtgtgagcggtagcaagccccgtaccggcaacaaaaatatgtaaacagataacgatgaatcctgagatataaaaaactctggcctttgtctgtaaacagtctggctccacttgaaactcatcatgtaacgccttatatatcttaaatgatgaattcgtaaacgtatatattccccaacctatcacaatattaacactatactaagttaggatagtggagtggtatgtgtataatccgggtgaactccaaagtcaagcgacaattggcccggatagtagtgaggcgggggactgccacggggagctagttatatatcactaataccataatattatataatactatagttggtacctgagatactaatgtcgataataactactgttatggtaattattgctgttatcgcccactcattctccgtacctacacaatctcagtccactcatcacacaactaactatacctaactatacccctagagggagcaaactatataagggagagggagatagttaattatatacccctagagggagctatcttaactatataactataataccccaagagggagctacttaacaatgtaaatattacctagatccttgttggaaacgaagatgtagtaggatgccatgagtgtggagcagatggcggaagcaatgagattggcgagtgagttgaacagaattgagcagtgcaaatcatgaataaagggaaaactaatggagacacacgtcataaccaacagaattatgtgaaaaattgataaatactttaaccactttttcacagggttctgaatcaacggacatggaccaccccccttaggcctcttaaatgatttcaatatcaacattaatgattatagtgttaaaatagtattggagtggaaatagtgttaaatgtgttaactcacgggaaatggagggaaaattgagttgtttatccgccgtgaagagtggagatgaaagagatgaggtcgtgatttttgaggattgtgttttccttatttaacaattcccagtcagtattattaaccaaaaccaacacacccggccttatcttacacttctccctactattcaaacgcccattatacctcgaaatattacactctatcaacacacttttacactcagtttcctcacttttcccctcagtttcctcacttttagcctcactttcctcagtattccctgaattattgtctgaattacctgtgtgatcggtggatatggagaagaaatctttttttgagccgatgatgtggttacggatgtagcagattaattgtcctaagttaatatttttagagaagattttaagtgttagttccttttcctggtcaattacgagagaatctaatccaccgctaaactctaacgtcacaactgtaacactctcatccatacacatccaactctaacacgtgaaatattcttattttattaaaataatatcaattatttgtaaaacgtgttaaattgtgttaaaatcaggaaattttgagggaaaataaagaataaatagttcttgtcccacgataataaaattttaaatattttattattttaaatttgtaatatatttttcagtaaaagttgtttatttattatttctaatcgctagactaaatttttattccaaacactcaaattactatttttcaatattttgacgttatttcaatattttgacgttatttcaatattttgacgttatttcaatattttgacgttattttgataaatttttataaatttggagatattttaaagttatttaaattatttaaattttgcaagatttttcagtttccataaatttcgtaaattccgtaaatttgccttaaatttcgtaaatttcgcttaaaattttaatacttttatatatgaatgcaagtggctgtggattactatttgaaccaggtggagataacaaatttggacagcataataaacaacgcactgaattgcgaattcgtatcggaatctgaagtggtaaaactttgtgaaaaggcgaaggaaattctcattgacgagagtaatattttatttattaaagcgccagtcacggtcgttggtgatatccacggccaactctatgatttaaaagaattatttcgtatcgcaggatccgctccaaacactaatttcctcttcctcggcgattatgtcgacagaggctattattccgtcgaatccgttattctcatcgtctcactcaaagtcagatataaacacagaggtaccctttacggagcttgcttccacttagttatgtaattcttacagggttaacaatcccaatgggactctttttgtcccagagtcattatatagtattactatagtaatatagttaggtaattagctccccttggcagtcccccgcctcactactatccgggccaattcccgcttgactttggagtttaccctagatattactataccactagactattctgactcaattactatataaattctaacgatggttgtagtatttataataagggggaatcacgagtgtaggcagataactcaagtctacggcttctatgacgaatgcctacgtaaatacggtaactcgtacatctggaaatgcttcacaggtatcactactcttcactctatcaactatttacattattcccacattttcactgtgttagaattattcattgtgttaacagtgttaacattataaattgtgtttgcagtgttaacattataaattgtagatttgtttgattttttaccattggcggctttgattgagaataaaatattttgtccgcatgctggtctttctccctccattgactcactagatcacatccggaaacttgatcggtattatacaccataccactatacctaatactatacttacattaatactgtacttacattaatactgtacttacattaataccatacaatacttaatagtataaaatagttaataccatacagtagttaacagtatacaatagttaatagaatagtaagttgcatagttagtataacaaagtaaagtatgataatatagtagtaatgttgattagaatccaggagatcccgcatgagggtgcgatgtgtgacttactatggtccgatcctgaggagagaactggctggggacttagtcccagaggtgctggattcacctttggctatgatatcaccaaagccttcaatcaaaacaacggactcgatctcatcgccagagcacaccaactcaccatggaagttccaacactattcttatattcacactatatactatactaatactatattaatattactatactactattatactactgtattgtactgtaaggaaggggtgggttagagaggtcgaggaccagtcaatggagtagactggtccgagagcgaaatttttttccttgctgctgttttttccgcgcaacttcttacacagattactctccaatttctcctatttactcctatttactccattcattactataattacccttaattaagtatatagttggtgataatgttgttagggataccagtggtcacaggacaagaatgtggtgacgatatttagtgcgccaaattattgttaccgctgtgggaaccaaggcgcaatcctagaaatcgatgaacaactcaatttcactttgtattttctactgagttatattattaatacattgtgttaatgtgttgtagtatccagtttgatccttcaccggaacgagaaccgccaatcattcccgaaatcacagattaccttttagaagatatcaaatacatcaactaatctctaatttactctattacttgtgtattactagtgtatactgtaaaagtgtgtaagaatgtgtatagtgtgtaaaaaagacacgttggtgtcgaaataagacacgttaatgtaaaaagtgtgtaagatgtgtaaaagtgtaaaaaatgtgtaagaatgtgattaaaattgagagtgtttgtggaagatgcaattgtcttgtgagacgaagttgacgtggttgttggtgatgttgaatcgtttaattttattattgtgaaagagaatgtgtagtctgttcaccaacggcttgattacgattttgtatattcttttacactcttccgcgctagaccacagcactgcttccttatattttaccatgtgacaactcactttaaacgcaatttcaaggttataattcgtgggaaatatccggtattccagggggtccaactctccattcacaccgtagaactttaactcagccaggttaacccgcgattcagtaacgtcaatccacttgttcctgcccgttacaaatcgaaataacaaatacttgttactgaacattaggagaaatttctctacgagtccgtcaaaaaatgaaatgtggttcagctgttccgagggacttggcgcagcataaattaacacagccttgccatcactgggcacatcaaacactttactaaaacgatactttttacaaggcctaaactcttttaactcaccttttttatagactttaaagtactccgtagagtcctcctcggtaatgtccaacgacacagcaccgccgtagaacaaatccttgtaaacctttaatacctcaactggtaagccatgcctattcgtaaccaacggataatgcctagtttcactcctgaaacacaggtttatctcattattggtcggtgtgacgggtacaatttgcccattcctcagcttcaaactaattttattttcgagtaaattgtatatgaaaacgtcggccacagtgcaatttgtgagttttagccctggaaagtaaaattcaacacaatacctcaggcagtataacgtcacagaatagccgccgggtaattcctctatggatttcacatcttcatcgccaaaatggaatttcaactcgcccaaattcattcttgtttctgtaatattaatccatcgcttcgtctcattccagtggtacaggaaataattaaacttattcgtcaaaatcgctaaatattttaccatgtcctttttatacaacgaaacctcccttgcacattctaatacatctgtagactcccaaattactctcactcccgattcaccggaattgtccgaatcaccagactcatccgaatcacctgactcacccgaatcatgagattcgtaggattcaatgattttattgaatagattcccgttgatgggaatgaaattggtgtagtggtctttgtctgggatttgcctttcgttgaaaacggtgttgaaaatgcccgagcttttagtgccgaaaatttggtacttgtgactatcagtgctaaaattcttactaatgtccagagttagccggtcagttctgacccattcaccgttttgcctactgagtttaacaaagtcctcattgttcaggcgtaaaatcacactctttgacaccggtgatatccgctccacctgtaccacatacgcatactcatttacatctttcgcactatatattatttcaccctttaattccctattcgtagtcattgtctcactaatagtgttagtagtggactcagtagtagtgtcagtggtagtatcagtagtattgttagtagtagtgtcagtgttaaactcagtggtagattgggtagaatcgataatggtactgaatccgtaattactattgcaagagtatgtgccgccgtttttatgttcgagataatcgattttatcagtggagccttcaattcttatgtctacagtgagtggttccagagccggcatgggtttccctaatttagggttcagaaatccattattcacaccaatcaccaacttaacactctaataaattatttaattaggttattaacttacacatatgattagtagttgcagtaactccatcgtaaactgaatgtatccaaatgtgcgttgttaatcaggttaattatggttaattttgttagaaatgttgtagaaagagagaaattaatgtttaatattgaattattaagtgtttaaagagttgaattaaaaagtcaaatttggggtcaacggcaggaaaataaatttttaccttattttacaactatttacaattggagtaatttagccaatttcagctattaattagctgttaatttgatataacttggttaattaggggttaaagttaactatcactgcattggctcataccagtgtgcattaacacagtattactatattatatatatatatattatatagtatagtacatagtatatatagtatgtatatatagcatagtataatgtgtgtctgggtttacggctagtaaataaggtgcatgttacacggggtataacactatctaaaggcttctaatatactataaacaacaaattaatgagtattaattggtgtatagtactgaaataagtgttatcttactgtatactaatactatatagtatactcctaatactatacatataatactataatatatataatatactatatataatatactatatataatatgctatatggtatataatatgtatgtatggtatagttatattgttattagcattgtgtccatttccctttataatttaacttgtagtgtataattttagttcctgtgttaattgtgatatttctcttgttaacgtaaagcgaattaataaatttatcaccagttccgcaggtccaaatcacatcatcttcatatctcaactcactgcaacttacattatcatttattatatactttaatcttctcaaatctcgtaactcaactctgtaatcgcccgtatccaataacacagtggcaccttctggattcctagtgtacagggtaatttccctcggaatgaggtatactttctctttccactcgtctttaatgtatttgaatagggtaattttatccttgaaaattacttgcagttccctgttctggctacatatgacgtgtaaaaagctgttttggccgggtttcaggtatataaataactcgttcatatagctgaggccgtagaatttaaccccgaaattggtcgaatatatgaatttcggatccttgaaaatgtccaatttcacagtaaaatctgatttgtttagcttaactccggtgccagtttgaccattacgcgtataaagtccaagctcaggtaatttgtactccttctcagttagttcaccttgttccagtgtggacacgacaaacttatcttcaaattggagtataaactttttactctttgtcatgactttgtattctaagccttttggataagtttcattgatttttttggtccagattaccctgtcgtagtgcctaatttggacacatctcataccggtttcatagttgattaaatacttacccctggaacttgaagtgataattaactcatttctgtcaattaaaactaaattacccctttcctctgtgtaatgtgtaatgtgagataactccttgtatcttacataccagttaccattagcttcaacacatttgaacaaagtatcagtcaggattgaaatagttttatcagttaaattgtaaattactttctttatagtgtcggatttgtttctggtactctttcgcatcatccacaccagctcaaatcccatcctgaccattgtgcacttggtaccctcagatactgtaaagacaaattgcaacccaccaatgatacttagtttgacactgtattggtcactggtgagtggaatgaactcgccgtttgagtgtctgaaatataacttaattggcgggatttcacagtgttccacagtaaattcaccatacttaactgagaataacgagaatttatcctcaaactcaacaatcgtaaggttaagttttttgtagaaaattaaggatttcgggtatttacctggtttagctctgtaaagcacagtttcacagtgttttatctcatcacaaatgacattcggatcaaaattataataaaaattgtagccagaaattagtaatttatagccatttcccctgataacttgaccgtcaaggcctagtaaatggttaattatgttcctgaaactctcacgcatcacgtcaattcgcaccaaaaacaactcctccaatgattcacacattttacaactttccacaatactattctcagacattaagtcatctaccgtagaaacacttagtggagattcacttgcagattcacttctagagttaattgtagagtgacttactggagaaaagtttggtgtggattctgtgtgttctgagtgactgagattatcgtgtgttgggattggtttagggcagatttcgcgttgtttagtttgtttaattcctttattaagctttcttttaatgtcttcgatgagttttcggtcgatagagttggtattgcggttgtccccgggtaagtccaatttcctcagttctgaatcccggagtaacagaaaaatattattattttccaggtcaaatagtaagtatttgggaaaattattccgttttgtaatgtgccagactaatttcccgtcaaatctgatccttttacagttggatctgagttccattacgaggattaactcgtacaattctactacacattggaggtaattaaaatctctgttattatccagaaatagtaacttctcaatattgtaccgcagatgtgtgatgttgacccaaggactaaggagactcttccgctccattatgattggtttattattcttcaaaatcgcattatacttcggatatccattttcactcatttttgtgaatatttccacaaatctttcaagtatttcacaacatttctcattttagctagccaatctatttagacattacgcaactaaccacgaagacattactattatataatcacgtaaataaatagatttgtagtttgacatgtgtttaaaagatgttattttacgctaatttgggcttaatttggcgttaatttgggttatccagtggtacagtattatggtactattatacacatatgtatatacacatataatatgtatataatatagtatatattacattgaggatacacttacaaatattaacacctcaagtacgtttggtgagatttgttaataattccaagaaatcaagtgttcatggagatttctcaggttaagtttatggactagatcgagtctgacctgttgcaggagtcccagttccggtctgacctccgtcattagtagtaccattctgacccgaactagctccagttcctgtagcgtttgacttgttaaaatctaatttcttagtttcataatcgcttctgacgtggaaattgtttgattcaagatccagtgtaaatgacttgagtttttcaaacttcttatcatcagtacttttccatacatctgcttcgcctaattttatcttcttacactttacaccatttaatattaccaagtatgaaaacgtaaatccaatgtcaattttgtaatctgacgcactgagttccttgtcattatcatccaggaacttgagattactaacatcatgtttctgactggtgacatcagtccagggactattcttgttttccctgtagagaactattagcttacaactcttaagtaacaaggcaagatgttttttactatctcctttaccttttagtaccacttttacggcgtcatcattatccttagacttccagacttcagtcccatttttgcccactatcttagaaaacacacgattatctttagcagcgaatgatctagacttaccatactcagagtacttgaactcttgggtactcatattctttgttatgtcaagagtaagaccagtaccctcaggacccgtaacttccctcgtctcatctttactatttgttatagtaaatttagtattactaagatctattgaaaatgctttaatttccttataatttgcatcgtcaactgatttccaaatgtctttatcagcgagcctcacagtgagacatttgactccattgttgaactcgtaaatgtaagacaaatttacaatagaaactttatagccagatgaagttatctcagtgttattctctccatagaacttaagcttagtaatgtcaggtttggtagaggtaatatcattccagcagggctttttagaaccacaattaaaagtgccagatttgccacacttgtatagaaatacaaatttgccactcttgagaagaatgagaagttgtttcatgttctttccagaaccctttagtaccacttttactgcgtcatcattaccactaacggtccagatatcattattacccttcactatcttacagaatgtatgagtatctttagctgagtatgtcctgtagtctccatccttggagtagtctaactcgttggtactgctgctcttctttatgtcaagggtagcagcggtaccaccagttgattgcggtgacccactaggatccgctccgtgggccgatttgtagtggcacgatataagaattgcgataaaaattaaaatctcaaatttcatcagtattaactaattcatatttatcccactgagattaacattattaaaccttaggagtatcattcctatgggtgattaggaaacgaggtaagatatcttccccattcgccgtgaattcctattctatactctttgggttattaataaatttatattacatattacagacgtatataatatattatatacccagagcatatcatacatgcgtatcgtatagtgtattaatgctcccttagggaaattgtaaactcatcaaataatcacataattatactttatttagtgttatacgatgctatagttaagattatatagttaagtagctccctctaggggtatattattagctccctctaggggtatataataagatagctccctctaggggtattagttaagtagctccctctaggggtatagttaagagtattagaattagctccctctaggggtatattattagctccctcttggggtataaagttaatagtattagaagtagctccctctcccttatattattagctccctctaggggtatataaattaactatctccctctcccttaggtagtaagatagctccctctaggggtatagttaagagtatataatgaagaggtataatatattgaggttaggtttacaaattttaaaccttaaatctatcaactaatttagtgatagcacaaatacacttagtgatagtacaactaaacttaatttaagtttttaaatgcgattcaactcattgtaactcaacgagtttgacaaatatttagtcaattaagaaatcaagtgtacatggagatttcttagaagatttagtctttgactatttaacatcaacgtctagaagaatcttcaggggttctaccagatgaattctcttgagctcttgtagcagatgaatgtactgtatgacctgtactaggtaaaccacctgtagcacttgcattagacggatcaactgtagcactaccggtattggcattggggttggtatcattgttctgactgttaatgtcgatccatggtttattcttaccatccctgcgaagttttataactgtatcagtgttaaggcaaatggacacttcttttttaggactacctttacccttgaggacaaccctggtggcgtattcaccatcttgagcagtccagatattcttgctacctttcactatcttggaaaatccatgaccaggcttaggagtgaatactatactatcgccataattcctgcactcgtaatccttggtaccattggtcttcttgatatctagagtgatcttgttagcactagagccaccagatttagccgttgtagttgtaccggatcttgaagtagaagattgtgttgttgtagcagcccctggattagatcctccagtagcttgagctttgggagtagttgtcccggaagaagctccagaattggtagtctgggctcctccaggatttcgaagagagtttcctccacttgattgggatgaattaacaccaccagcaccatgtgctggtttgtagggacataacaatactgcgataaatattataacaattttcatcaatattagctaacagttatttatgatgttacgataagattattagaattgcagattctcattgctattcctagctagagaactgcacctcgttattccccatccagtattctgcactcatcttattttcccaattctcaacattatttactagttctcatctcttataccatccagcatactcataccatactatacacaataacaatagtatacataatagtatagtactcctaattatataatctatagtatagtatagtattctaattctgtagataaggtgtagtatggtattctgtgtgtaatttgggtggagatgagtccccggaattagactatactggcaccaacaacgccattaactatagtatatataatgtgtatagtacttgagagtatagtacagtaatagtataatagttgagagtattactatagtattagtactacagttactggagcaaatcttgatacatactatagtatagcattacatgactgtagttatgtgtctgtggttatgtgttaggcatatgacttgagagtatattacagtagtagtatagtaattaagagtattctgggtatagtacagtagttaaggttatagtagttagggtacactaagttatgtactactatactatactcctactactatacatattatacatagtatattatatatagtatagtaatagtatagtattatagtataataggtatagtatcttaggtatatagaagagtatagtagtactatagtattactctatttactccagctactctatgtatattatctaggtctaggtattagatcccgtactcacgtctggggttatgtgtctgggtttttacataataccgtactaatactatagcgtactaatactacagtatagtctaatcatagtacagtaatacagtattactatagtactatactgcagcaactatagttaacagtactataactactatactatactattactatactattccactaattatactattgtaatactgtattagtatagtatagtactgtacatgtctgggtttatatattcttgacactatacaaccaatctactcccaactatagttaacagtactattactactattaccattactatactattactatactattactatactattactatactattactatactattactatactattactatactattactatactattactatacgaattccggattatgtatactatagtactctactgtagcaactataatcaacaatactatacatactgcagcaactaactccgaataacacgtacaataaaaatactataaaaaatactataacaaatactataaaaaatactataaaaaatattaagaattgtaaatctggaccacgtactgtgccagatctaataatcgattggaatatccaaactcgttatgataccacgagactaactttacaaatgtctcgttcaactgtattccagcctttgtatcaaacacacttgatcttttttcctctataaagtctgatgaaactacttgctcctcagtgtaacccaagattcccctcaactcaccctccgacgctctctttatagccgtacaaatctggtcataggtggttgggttaataagtttcacagttaaatcaacagctgctacggcgtgtacgggtacaaaaaatgaaattcccttgagtttcccgttgaggcctgggattactctggctacagcttctgctgctgggattggcactggagcaatattaacaccggcagtgcggccacaacgggcgaactcgcccggtctcggaactgaatcaatcaaattttgtctggccatgttgggccagattgcgctgacaagtgcctcctgaaccccgaaattctcatgtaaaaccttgacaactggtgctaggcaattggcagtacaacttgcatttgacattatacgcacagatttgtcatagttggtgtggttaataccgtagacaaatagtggcgtgttatccaatggtatggcggagattattaccaatttggctccggcatccaggtgccgagttgacagctctgtagtcttgaaaatgcccgtacactccagaaccacgtccgtatcagtccagttaatgctgccagggtctctctcaaatgttagatttactcttgtattgtttaggagtaggaaattttcctcgagcagcaatgtgtacgggagtttcccgtaaacagagtcatactgtagaagatacttaacatattctggcgtcattgaggggtcgttaatgtgcacaacttggatattatcacgcagtaacgcggccctgtgcaccgaacggccaatacgaccataaccatttataccaatctttatcatatccattaactaattgtgttttaggtaaatttgtaaatttgtgaaattttgtgccaaagtgttaagtcgtaaacaaatttggattttgtatacccctagagggagctaataatatacccctagagggagctaatttatatacccctagagggagctaatataagggtacccctagagggagctactttactatataccccaagagggagctactaatactcctagttaagtctatagtatataaagtattaaggggtagagggagagggagattccataggtggggaatctcacccaaaaataatcaatataatataaaaataaaaataataaaattattaaattgtgtgtgtaagattatttgaagagtttggagaagaagcttggttttttattgttgatgatgggtctggtttccgagagtgacctcggtaccacatacaactcactcatctccttaaacctcaccacactgttattacgccttatattattactattggtggttaatggtttggtcggagctgcggtgttagcttgattactgttgacagtgtgtttaaagagtttgagtcggtctttcatgagtttcatgtatgtcagtgtttttttaaagtcttcctctaacgtgtttttactctcctctatcacccgcagcttcgcctccaactcactcttctcctcctccaatttcttcatcctatcctcacttaccgtgttatttactgggtttaccgtatttacagtgttagaattagctccctctccccctcctctgttaacagtattataattagctccctctaggggtatattattagctccctcttggggtacccttgatagtaagatagctccctctaggggtatatatttaatagtattagagttagctccctctcgggtaggagtaatgaattcattatttccttctacatctacagtatccatactatcaacattctcctttacagtattttgagtgccatttagagtatgcaaattggtgagtgactgtaggaatagttgtgatttgagtaggtgttgttgaatgagagttacgtattggttactgacgctgtactcgagcttacagttgttattcagtacatacaacaacttatccaataacagacgattcataagcttataatactctaactcattcacagggttatcatgagtagacatttccacactgtctaccgtgtccactgtgtctactgtgtctactgtggtgtgatttagaagtttgtgtagtagtttggacttgagttgttgtagctgatttgtacctacggtccaactcttccaatcttcaactccctcttcctttcctagttcctctccagtagctccctctacccctcctttgttaacagtattataattagctccctctaggggtacccttatagtagctccctctaggggtatattattagctccctctcgggtagcagatttagtactatttaagtctacaactggatcagtagtggtggagtcatcggaatcgtaaaagtcgtgttcgtcacgccaccacctgaaaccgttttcattactctgcggcgttaaactgtcaaccgtatccaaactactcctactacacaacccttcccagctctccacattcacaccatctcctcccatacacaattttgcttcagagtttacactatccactgtgttcttagtgttattagtcaccctgttagtgttagtgttagtgttagacaatgtgttgttagtgttacgtgggttgagaagtccgaacctcggggatttgagctcatttcggttaaaattattcacaattaaattattcctttccaaattttttacagagtttacactttttttggtgaattcgggataagttttggtgaatgcgggataagttttggtgaatgtgggataagttttggttatgcgttgatttcgggtgaaggtgtaagaattatccgattcgtagtcacttgggtcagaatcgtcgtaacctacggaattcaccagcacctcagccatcaccacaattctcacaaatatttattttattttaattatttaataattatttaataatttttggatatttgggttaattttgggaagtttgggattgtctaattttcaagggattttacccttccaacgcacccatgagcacagttgaaccttcaactgttactcctctttacaccatggaattggactaattttaccttattttacctaaatttaccttattttacgatatttagaggaattttacggaattttacgttatttttgggaattcccaaagattcctcaaaattactcaaattccctaaatttacctaaaataattaaaaataactaaaattttaattatctaattttagactattatcactttacactaatagtacttatattaatactacttacagtactattaaatcactttgtaagttgtattatagccttaatagaacaattggtactacgctatttacactaaccagacctaccaggttcgaatccccaaccccaaacacataactaactcctaaccacaaactaaacactgcataacactaactaacatgactgaactgataaattagtgaacaaattaatgtaatttacgagagtagagtgcgatgttgcaggagagagaggaaagaaagtgtcccgtggttaagcctaccaagttagtaattgggaaccttgcaaataactgataccaatccagcagtaacagataattaccaaaacaaaccccaaccaataacattacacactgtaacacaaggactgctgttacctgtttactcattactgtactgctaggaatgagattactcattgtactgctaggaatgagattactcactgtactgctaggaaagtgattactcacatctgaactaatgttaggaatgaaaaagtgcacaagagtcccgagagccacggcagtgtacattagagcgtagaatagatagtttactaggtaagtcaccgaattgttagtagtgagaacaaaagccaaaaacgccaaaaccacaaaaaaacacaataataccctgatcttagtcctcaaattactctgtaatatcttggacacacgagctacagtactagtgtgagtggagttagtggatttaatgggtaaaaaggtgataacgggtagaatgaggaggtgaaagagaagtttggtagggttgatgagaaggtgtagtagtgtgactttccgggttaggagatcaacgctcttggtgttatcgtggaagactaaaaagtataataaaaacactgaaaaaaatagacaactcaggaagtcaaacagacagtaacggcgcaaattttttatcatttaatcaacagatagaataatttacatattaaaaataaattaacaaaataatttgttggaattattaattgttatttttcaaaaataatcaagttattgtgtaaattttgagttttatttttttccaattttatatagtaaatataacattaatttagggaatataatagtatagtttagagtataaaatacacaatagtgaaaacataaatttaaagataataaatttaaagataataaatttaaagataataaataaaaaaataatattaaacaatttgtatgaatggttggaatctgagggtaaaaaatttcaaatttggctaaattcaagtaaatcaaattttcagtcacatactccaaattacgccgtaaacagctttaacaatgtggaacagaagtgttaagggttgagttaggggtgagaggttagagttaagagtgagagtaattgtaaccccatgagggtgaatgaaggaaattgagctgaatgaaatcagttcaagtatttacgatttcggccaggatttaactgatttaatgctctttcattatgcccacgaattactcatccgaacctaaccacgacaaacggattccaacccgtaacacctttccaccccgccctaaactctaactctttccaacacttcttctctttactcggacgtgtttcaccttttttcaccttttttcacattttcgactttttttcactttttccagagtttttcactttttcgacagtttttgacgtaatttgaaataatttcaaaataaaattaaataaaataatttaaagtaataatttaaaaaaattggcaatctcggcataacgtaatttcatatttatttttaatttacgagttaacattttatctattttacattagttaatagtaatagtgattggatttgtagattgttatgcgattgtgttataatttagtgcgtggcttgttattgcagaagatgggagcgcacttgagtagtccgaagactgagaaggtgtcgacgagcggcggtgacttcagactcgactccacagtcttcggcgcaacgtccatgcaaggctggagaatctccatggaagacgcacatctcaccataccctcgtacaacaataccggtaccacttttacccagaccccccagaattagtagttatcatcatttacttaattattaccatagttaatttttacccagactccccagatatagtagttatcacattctacttaatttttaccccgactcccgggaattcgtagttatcacattctactttgttattactatacaacagtaaaaaatacccctactccccggaattcgtagctatcaacttttacttaattatacagtaaaaaagtgttcgactccccggaattagtagttatggtggtttacttaaataatactcttaactatacacataataatatgataggagatcgtgtgatgacccctggaacgggtgacgagagcatttctgtggggagtatttacggtgtgtttgacggtcacggtggtaactgtgtgagtcgttgggtgtctgagaatttttcaaatgtgttttctaaggagtttcgggacgtgaggcgacggtacttagagggcagtttagtgcctaagcatgagtcagactccgtagagtcaaaattagtagccgaagcgctgcaaaatagtttcctcagacttgaccaacacctagccacacccgaagtcgactcacaacttcacctcatctccaaccgcaaaaacgatgaaatcgactccactaacctttttaaagttctcttacccgaaaaattaaataacagacaacacgccattgatatcatacaacaactcacttcattcgataactccttcacgccagccactgatacaacacgtattaacctagttatatttaattctaccccaactcccaaaatttagtagttatcatcatttacttaattattatatagtattaaattattggttgactccccagatttagtagttatgacattctacctaactttacctcgactccccggaattagtagttatgagaatctgcattgattgtgtagaggtggaggaggaattgaacaagtatgacagtattccgtactataaagacgaccaggtggatgaagcaacaattaacagcgagctcggaattgacaccgacgaacccatggaatccgacggatccgtcggtggcactactacacaacttacaaccacacacactgacacttctcacacttctcaaacttctaacacttctaacactactactcaaactgaaagtgacacggccgcatttggtacgtatggtacggcggtgacaacggtggttaacacgttgttaacgcagaaggagcgggaggatttatatgcaatgggttgtggcgctacgagtgtagtggttgtggtgttggaggacccggtgccgtgtgtcgtagtggcaaacgccggtgactcccgctgtgtcttatcaaggaataagctagcggttccgttatcggtggaccataagccgacggacgagcttgagcttagtcggatccgccgtgccggaggcaatgtcatcaacggccgcgttgacgggaacctgaacctctcccgcagcctaggcgatttatcatttaaaatggaccagaatttggaccaaagggagcagaaaattatttcatttcccgatatacaaattgttaaactcacaagagacgacgagtttctcgtactcgcatgcgacggcatctgggactgcaaatcaaaccaacaagtcgtcgacttcatacacaccaaactgacacaatacgccgataaactccaagataaacattctcacggtgtaggtgtgggtgataaacatggtcacggtgtaggtgtgggagataaacatggtcacggcgtaggaatgggaatgggaatgggaatggacaggaggaaggaggtgttggagaggatatgtgaggagttgtgtgatttgtgtttgagtagtaacccgagcgagtctgaagggatcggatgcgataacatgacagtcatcatcgtactattcaaccaacaactgtataataaaatacattaatctacattcaatctctataccttacttagtcttttaagaggttaatttgcttctatttatacattatttagcctatttttagctctattttagtgttttaagaggttaatttgctcctatttatacattatttatcgttattttggtgttatttgagtgttaatttagtgtttaggataaattaggtagtattgtactgagtacctgtgatttagactattgtatttaaaatactcttaactactgtaatacactattaactatatacttagaatagtgtacttagtattatagtataatactatatactattcctagacttactagtattacctatagtactgtagtatactatattactactgtacccaggaccttaaacccagacacctaattactatactaaagtaatataacaccttaactaatacttaagatacttagactatactcttaaacccagacacataatactatactactactataatactataatactatactgtatatactatataatatacactatgtatagtacattagtagttatatggtaaagtgtataagattagttaactgatcttgctactattattaccctattattaacagttaattaactaaatctaatcatgttaatggtatggatttggtaatgtttgatctgcagtgtgagtatgaacgagtcatgagatagtctaattcctgctcctgaattaacaaaatgatccgttagatccattaatctaacatagattaacaagttaacaacattagtaacattataaactttgttaattatgtgaaaattagtttcaacctggatctaataataattttaagatttgacgttaaacttgagagaactcaagttattaattaaattacactcagatctaatgttactttattccaaatcctcaaatacaaattaatcaacccaaaactctcaacaaccaaattcacaaatctcatacaacaaattaatacaacaatttgataacaatttaataacaaatttgacataacttaatataacttggtaaataaataaagagggaggaatgatattgataatattgttgtttgggatggttgtatgtttggacccggtggatatagacttactgcagcctttgaatatcccgggaataagaacccagcaagtaacattttacggtgtagaataccttataatagatccggatcctgagcattttattaacactgtccggtacggcaacaatttaatgttccagaagaatgagaataacagctgtttgaagatagtcagggtgaataacggggttcacagttttttgtatctccgtgtaatcacaccggcgaatcaggatattcaactgagatttttcctgcaagacggaccaccagtacttggtagaatgtcacccacggtcacaactgtcaacacagtcatgagatacgccgccaacctgcatccctcactcaatcccagaggctttaacatcttcgataatcctctaccactagacgaagatgaaggcgatagcgatgatgatgatagtgacggggatgaaggtgatgagggagatgagggaccagagggaggagaaggagacgatggagatgagggaccagagggaggagatggagcagtggatgagggaattgatcacgattttgaccaggacatcgatgacgcggtgagtggaatcttgggagtaggagatttaccaaatgtacaagcagcactgggagtggatcaggaaggaatacaaggaatgatcggaggattaaatcaattcataccaaatctacctgaaattccagaacaagatgaaccaggttgtaccactagatataccaccagatatacacccagagggagctaattaactatatacccctagagggagctaaattatcatatacccgagagggagctaaattaactatatacttagaattatatacccgagagggagctatcttactgtataccccgagagggagctacttaactatatacttagagttatatacccctagagggagctatcttactgtatacccctagagggagctatcttaatatatacccctagagggagctaatttatataccctagagggagctatcttaatatatacccctagagggagctaattaaatatatagttatttatatatacccctagagggagctaattaaatatatagtaaataatgtctaatgctattttagaacaagatgaaacacaccaagaacccgtacccattcccgaggaacctgtagaacctgtcgaatcagaacctgtggaagaacctgtagaagagagtgaatcagaatacccggtgccggatgagtctgaagccccgataacgcagcctggaactccggtaactcaattcttatatgctgatgagatccttggtccaatctcagacagtgaaactgaagacttatttgagcaagaacacttggagccaggaactgaaactcccgtaagtcaatttgacccattggaactacacgacttgggaattgaaactatggaacaataccaagggggatttactgtagattatgaacctgtccaatctaccggggaaacccccggagacacacaaactttagatcaaataatcacacagttggtagagttacagcaaaagtataatgaacagttcaataaagttgtggaatctgcacagtctgaagatgtaattccagttgttcagggcgaaactacgccaaaggaaagtgggcaaaaaggggccgaagtggtggaagttgaactggaatcagaagtggaatccgaaggacattacgacatttacgatgaagacaaaactgataccgaaggagagcaagaacctatggaagaaaattaattttttacaacaattaattattttaatttttgaataatttattaatttttaaattattttaatttttaaataatttattaatttgattaatttattaatttgattaatttattaatttgtgaaaatttgagaatctgaacccacggatctcaaaataatttatcctctgtaatatatcaaatttcataattattttattattaatttaatcccttgtaatatattaaaattattattttatttttgttaaatttgtagaatttgtagattttgtagaatttgtggaagaatggacttgaacatatctgccgcggagagaacaaaattcttcaactgttcaaaacacttttggtctaatgtgccaatggagatttacttctccaacgagaaaaataaacttttaaccatccgcgacggtgagactaccgtctggaccagcgctcacggcagctactgtaaattcctctacgcctacggtaactccaaggaaattacccttctacaactcatcacactacaaaatcactcccatcaacggctctactactgtaaactcaacaaagttagtggcaacagtggggacaaagttaacaatggggacactgacaatgggaacactgataaggtgtggttggaggtggacagggatgtgttgtttgaggagatgagtgtgttgagtgagggattgccgagtaacgagagtgagatggagcgttggactgcagagtcgaactttcacaattttgtaccaaaggagaagccgaaatactttgccgtagacctggatcgcactttcctcatacacaactcaaagaaaatgattgaaaacgttaaatcattcgaacatctaagagaaaataactttgtaccatttttttgtacaggtacggctttacggggcttgctaccgctcacacagcttatttactcttatttactcttatttagtctataggactctctttagcccccgggctcctacttatcccttaattaccttaccccattatttctcaatttgcaaccttttgatattttatttattatttacaattgttttttacgaaatgtgttgttactgcagcaatattgactgggtgagaaaatttatttctcctaacccgatcaacttttgcattttattttttttacccatttttaacaattattttttcataattttgaccaatcttagtttactatagttatctgtaaaaatgtgtaggccgttcgtatcaatgtgcgtttgatggttttaatgagataatgtcacagtattccacgtacaacggataccccggcgtatacaacaacggcgccatggtatttgactcccacggcaacattatccactccaacaccttctctcacgagtacatggaaaaattagttcaatacattgtggagaacaatttggaggagtatttcctgttccatgacgtggacgacttttactgcctcaaagacccgctctttttaaccagtaaactgttcctcttttacgaatttctcaatcccaaggttatctcaccttctgaactcgtgagtaaatcaattgttatgacgtattttggcaagtatttggtggagtttggtccgtttgtgaatggtgtggaccacattgggaagtttacgctttatgaattatttgccgaaatcgtaccgccaggcacttccaagtgctccggcgtcaaacacataatgcagcactataatcttagtagtaaagaattatactttgtgggcgatggcgagaatgacgtggagataatgcaaatgctggagaactcattcgcagtgttaaatgcgccagatagagtcaagaaattcgccaagtttacattacccaagacacacgacaataacgcagtcaaactactcttcaacaccatttaccattaattttttcataccgtgtaattaggattcattagtagttaagatttgtgatagtaatttgttattcttatacattatgatagtaattatgtagaaatatgttagaaaattggaatgtgaatagttgagagttgtagaggaaaataattacaattattgctgctaggggagacccagagggagctacataattatatacccctagagggagctacataattatatacccctagagggagctacataattatatacccctagagggagctacataattatatacccctagagggagctaccttatcatatacccctagagggagctatcttatcatatacccctagagggagctaataatataaggggagagggagctacttaactatataatcttaactatagtatactacaatactatgtataatatgtataatatattataatattagtgtgtaatggtttgggaatacgagggtatgagtgtgtggatctgaaatgagtgagattggaacgggtccctcctcatgtttccagatgattttaccttgaatttccacttccaaacactgttcctcaccaaacataattacttcagtcttaccatctgttattgttctcctagtcttgaatctggtaagtagtttccctggctccacccagtcattggaatatcccaccatatccaaactttttaatctattctctttaaacaataaactcatagtatttctcttgagattaaataataattggattggtaatccctgaaaaggatcttcacaataggaccacaataacttgtcacccagtttcaagtggtaacacatgaaattcagtgatatcttgaatattaatccacataaccttgttctacactcttttatcctagttaaattgatatctaaatcatataactctaggtgatccacgttgtacagagtctgtgttatgtcttcccactcaccttgaggtgtagatttctggtataaaaagggtttaccgttgattaatttggctttatattgtgtttgtgtcatgatttacggggtttacagttaatatgtatctagtgtgtagggccagtacattcttacacaccggtgcattatctaaagccttaaattaccatacgtactacacataatatactatatacacagtatttaatatatttattatatgttactgtgctaatgtgtaagtgttttagtgtgttagtgtgttagtgtgtaaaaatgtgtaaatttgtaaaagggtaaaaagtgtgtaagaatgtgtaaaaggtaaaaaatgtgtaagaaatgtgtaagagtgttaatcatttggtgaatcgaagactgtgtagtagtttgggaagacgagagtgttggtattgtcttcgaagatgatagagattggggatggttcatcttcattgggtatccagatgattctgcctcgaagtttcattcctaaacaggggtcattatcactaaataaacaagtttctgtattggcattttctattaatttccagtcgtcaggtttctgaagttgtttcccaggctccacccagtcattctcatacccctccatactcaaaatttccattacattctcctcaaacagtaaactcatagtgttgttcttcaaattgaaaaggatttcagttggtaatccatgaaaaggttccacagcgtaagaccacaataacttatcacccagcttcacgtggtagcaaaggaaaagagtaattatcctcatggtaaatccctttaactctgttctacactgtgataccgtggttaaattgagatttaaatcatagagttctagatcgtccaagttgtgtctagtgtgtgtaatgtctcgccaggagccttcaaagttagttctggagtataacacaggtttaccatcgactaattcagctttatactgtaattccgcagccatatttaacaatattagtattattctgagtgtttcggagggtccggtaaggcgttggtagggccagtacattcttaccaatacatacaaaatactgatttaagaggttaattatactgtaagtaacatgtaaataagattactatggatatattaagtgtattaacggtgtataaagtactaatagtattttacccagtatacccatactattatacatatactattatatatattatatatagtatattatatatataatatggtatagtatatatagtatagtattacgtgtctgggtttaagagtatagtacagtatttatgtagtattaaagttatacagcaaagtagctcactctccccttatattattagctcactctccccttatattattagctccctctccccttacattattagctccctcttggggtataaaattagggtatatagttgggtatatttaggagtatattaaattattgtgtgaatcaccagttggcaggtctaacaccaggtacatagcccaaatttacaaattctctcaggaaatgcctaccaagtccaaaaaatccataatacgctctaaaccttcctgtaatactattatttctaatacttcagtagtatgactaagacccctaaagggagctaataaagtatatacccctagagggagctaacaacataagggtacccctagagggagctaattctaatactattaactatacacccctagagggagctactttaagtattgcttaactatgtaccccgagagggagctaactaagttccagggttaaataactgtggaaaaagtaccccgagagggagctaactaagttccagggttaaataactgtggaaaaagtacccctagagagagctaactaattatatacctaatacctaatactatatacccctagagggagatatcttagtttaccccaagagagagctactttactatatacccctagagagagctactttactatatactcttagctatacccctagagggagctaattaactaatacccctagaggaagataactaatacccctagaggaagctacttaactatataggggagagggagctaattaagtaggagtgataattagtacgcctgggaaaaagagacccatcggggtggctaactaagtgtacaaaactaagtaataaataactaagtggatgcaagcaccgcaacggaccagaaattgggcagtagtgatgaaatttggcgggtgaggagtccttgggaagcgcgtcgagtttgtatttccagtacatgagctcgccaatggtcctcgagtccctaatgtactccttgtaccttttccgcacaaagtggtaaatagttttaaagtactttctcctcctagcacggaccactattgctctcctcgccggcataaactggccctccggtgaaactaatatatttacaaagttatatcaattatataagctcgtgacaatagttatgttgtaccgttgtttttcccgaagaatcctacgggtcgttgtggctcgacccagagctcttggggtatttcagggccataatacatcaactgcctccgtaccacctcgtcatcactatgaaatctcggaatcctcagcccaaactcatctacaacttttcaacccatttttccacacaattaacacataattaatcaattttcattattaaataattaaataatttttattattaaataattaaataattgtttggtgtgtagattaccttgaagggtgttgagattgtgagaatttgtctgggattctacggtaggatttgcataaatttgatcatttcccgggctaaaaacgtctgagtgtgtggaaattgtgttaatttctggcgatttcaagtgattgaataaaaagtcacgtcgttggttcaattggtaaataaaacaatttacataattaactaataaaatagtgaaaataatgtgaaaaaagagcataaattgtgaagtaatgaggtgaggtttgttgtatttaaagatccgctggtaggagccccagcgttggattccaaatgttaatttcattacttttctgtacaataaaaattttatcctcacctgtcagttttattaattgttgccctgttagatgaaatttaatctaactcccgcaaattctgtaaattatctccggaaatttttctaaagtttttttctcctgaactctcacacatttttttattcacacttttttctattcaaaatggcattattgtcacaactcataccaatttcatacgaaggtaatgctcataccattcttactatcaacccataattctaactccccgttcatcctcaatagtacagttgactatacttatttactgatagctatgggtaccaggttcgaaaccccgtcccgtaactatcctaaaactatttattatcacgagaacaatttatattatcacgagataacaatatttacattatttacattatttacatttgtttatgtgatttactgtgttaatatgttgtagacgagtttgatgtgtggtctgtgattgagtctagggtcaggagtattagtaaattcgaggtgaccttgacccggaacactaagcttgagaatttactaattctaaactcacacgccaaccacaaccacaaccacaaccccgactccgaacaagacaaaaagaaaaagaacctcaaagtcaaaaaatacatacaatgcacctatctcaactataccaacactaataactctgttaacactaacacaaataactctgtcaatagtaacacaaataactctgttaacactaacactaataactctgttaacactaacacaatgtgtactggtaacacagtgagtagtggatacataacggagaagccgtacttgtatatgtatttgatgaggaacatgtcagtgtcggattaccagcgtttgtgtaaggagcgtttgaagcagttccttaacgaccgattgggtaataaacttaacgaggagtttctcattattatcctcatggacggaaccgacaacagcaacaaactctacaacaaactcaaactcaaactactcaaactcaacatctccaaccgaatcatcaaactctataccacaagtatttcttacccattcatatttattttgtagttacgagttgacaatattacttattttgtagttacgagtttacaatattttgtattttatagttacgagttgacaaaattatctattttatagttacgagtttacaagtagttgttacgagttgacaaaattatgtattttattgttacgagttgacaaaatagataaatttgttgtcacgagtatacactctgtagttacgagttgacaaaatagataaatttgttgttacgagtagacaactagtagttacgagtagacagaatagaaaattgtgtagattctgtggttggtgtgagggaggacgagaatgtgcagttgttggagaagttgataaagaagtacgtcgtcctaaacattaacaaacgctacctctacctcctcatcaacatcatcaccatctccaacaccaactccatcaactccattcccaactcctaccactcttttaacacacatgacactcccatagactcttctaacactcccatggactctcctgacacttctaacaatgttgatactgtagacactgtcacccccgtaactactataaatactgtagaccctgtaactacagtaaacgtggtgagtaatgtggagaatgtgttgatgggatatgtgcgtaagtatgaggactggttgggtatattttataagctccggctgttgacggagtatttgatgttttacgagttgctacacaacaactccttcatcctcgactctcttaactccaccaaaattacatccacccaaattctatccacacaacacaactccattccacaactcattaacaattctcaactacacaataagttatgtaatgagttaacgtattacggcttgagaaagttcattctgtacaaacagctgctcgtcatcaaactggaaatggatgattcaatagtatacttggtaatattgttgatattcaactttgtgaacagtgtggtgacaaacaccgttggcacgatactcccaaactcacttttatcccatcagaactcttgcgcatccgataacactgaatctcacactgaatctcacacaggatctcacaccggatctattagtgaatctcacacaggatctcacacaggatctcacaccggatctattagtgaatctattagtgaatctcttacaggatcctgtaccgaatctattagtgaatctattagtgaatctcttacaggatcctgtaccgaatctcacaccggcacggaagctaaactagacagggccatcgtcaccatcatcatcgaactcatcattctcatcaataacattctcaactctagtaataataatagtaatagtacgagtgatagaggagagatgaacaagttaattgtggacatcctgagagatcagtacaatcttcatactgtcaacagtgttgagaatgtggatacggaaagatgtatgacaaatgcgtacaagtatgtgtcatttatatacttgttactgtacaagtttgtatcgtacaccaatatgaaatctgccgatactatggagaagttaattccactcgaaagtgatgtgaccttgtgtgacggggaaatgaccaacgagtttgtcgtgtacatcaacaacatctacaactcactcatacaactctcctatctgtccaatactgataacacagttgacactactaataatagggatgacacagatacacaggtgttacaattgttggaagaggttgagagtgagattgggaggatgtacaggtataaaaattacataatgaactactgcgtgaagtacttcatcctctcaaacctcgtaaaccacaaggagctcttcctacagttcaacgccgaagttgatcaatcacaactctacggctctttctacaacccacaagatattatcactggagatactgtggacaattttgacaatgttgttactgaggatactttagacactgtagaagatgtagaagatgaggagaatgaggagaatgaggaagaagttactgaggacactgtggacaccaatgctaatgcagttgacactgatgctaatgtagtagacacagaaccaaatgtagtagaagaagaagaagaggaactggaagaatatgaggaagactgggaggaaatgtgtgagccgttgggttcaatgggtttggagttgaaggtgtacaactgtgacgagtacgagcacatcttcaacaagaagaactataacccgaacaacatcgaggagggcatcaacgtacacaaacactgcaaaaattatctccacattctaatcatcaccaactccacatccacatccactcaatccaccaaagataacacacccaccaatgattctgttaactctatcaactcaggagacactgtggacaatgtggacactggggatattggggaaagagtgtttacggggttgagtatgagactgagggggatgggccttcgaatatgtgaggtgatggcgataaacgtggacaacaagacgaaggaggtggcaattcccataaccaaggaccaaatcacacttccagacttcaagtccaaactactcctatgccttcttatggcacagtcccattccaaacatggaacacagggtttaacacattctacacattctacacattctacacaatctaaacagggagtacaaagtttaacgaaggaaccccaattacttcctagggagttgaggatgatgttgttgaggggagggttggtgttgagtaggagtaggtatgagattggtgtgtcggaggtgtttgacgtggagttgtttggtgaatttatacacttggcaattaactttagacacctggtcaagatcaacaaggtgatggtaaacgataaaatcctgtccaccaacaatttactactcaacttcaactccgcctacaaaatactcatcgatcaaattatcaccactctagactctaacgataataatactgttaacactgtagacactgttgacactgtagaatctgctgcagtaactgctgcagtagatagtactgtaaatagtatagagagtactgtagacactgtaaatactgtaaatagtatagagagtgtagagaatgtggataatactgtggaagatactgtagcagatgccgtgggacctgacaccgtaacggagaacgccgtcactgaaataaaagtgtattacaagatgtatagaaagtttaaggcgtcgttgcaggagttgtctgaggagttggtgtacctgattcacctgaacaggattaataacacttttacaattgccagaggcgcaccctccggcaccacacccaacaccaacccctccacactcaaagataaaatcaaatccaacatcaaaatcatacaacccttcaaacacactattcaccatactaactctgcaaatggtaactcggtaaatggtaagaagagtgtgaaatcaatggtttcggattggagtagtgtgtgtaggccggaatccgatgtaaaatatgtgatgaatgtgccgtattacgggtatataaacaagagcataaagatgaatataaacctggtgagtacgaaggacgtgatcttttcctactgcatcaacgatgacgagaactggttcatcgagggcctggtgatcaacaataacattaagctattgaaggaccagaggatgaatattaacctcgtactcataccactgaagcagggacatcttaatatccccaaaatctcattcaagaacctgaaacttaacctaccaaaccataacatcactatcttcccacccaaccaagttctcatttaatactccaacatacgcgttattcagtttagtatagtatagtatagttaattagtatagtaaggagtatagtatagtaatagtatagtagagatgttaggtgtctgggtttatggttttggctagtccatagggtgtataaatactatagtagagtactgtttccagggttctaatatactatttacattatttaatggtagtattgaagagtttaaagtggttaaaattgtttgcttaggtgttaattcagtaccatactaatactattatacatatacataatacatatagtatataatatattgtatagtagtatagtatagtagtattgtatatatagttagtattatagtataactatcttatgtatatacaatatatatctcatgtatatacaatatatatctcatgtatataaaatatatatctgatgtatataccataaggtatcttaagcatacaactacagtatgtaatattactgtgtatagtattagaggtatatggtattcttaggtattaactatagtattatgtattaactatagtattagaggtatatggtattcttaggtattaagtatagtattatgtattaactatagtattatgtattaactatagtattatgtattaactatagtattagggtttagttattgagtgtctgtgtttacggctagtaaatcaagtgtatatagagtagggtataataccatttaaagggttctaatatactatttacagtattaaacagtattaagagttagcaagtgttaagtattagttaatagtatctattaaatatacactagtatagtattatagtagtatagttatcgagtgtctggatttaagggtagtaaatcaggtgtatataacatagtataatgactttattatactatttacagtgtttaataactgtaataaacagtgttaatagtattaaggagtgttaagtgatataatagaatgtactttgtatactcttaatactatacatatacaatatatactatagtatattatatatagtatagtattatagtactacagtattagtactatattagctaaggtacacagtattctggctatagtatagttttacagtagtctaacattggtggtataagtagtataatacagtaaagagtagtctcaggtatacgtttctaggtttaggtatatacttaagtagctccctctcccctaagaatagtagctccctctaggggtatattattaagacagctccctctaggggtattagttaagtagctccctctaggggtatattattaagacagctccctctaggggtattagttaagtagctccctcttggggtatacagtaagatagctccctctcccttagatagtaagatagctccctctaggggtatatagttgaggtatattacattactgcacattactctcaatgtgtaaaaatgtgtaatgccctaaaaactcacaaattaatttatatccttaagaatcctcaataaaactgtttccacactattattcacactactactcacaaatattctggaatctcaataaatatcccatctactgtggtgtcaaatttatatctctaaaattattaatttatacttgtaaaattattaaatttgtaagataataattatatttgtaagataattaaattatttgttgtatgagatttgtgaagtttgggattgtgggtacggggccttcaggtttatatttgggtaagtatttgacaaagtacataaagaattgcaaggttgactactttgagaagtccaaacagctcttgggactcttcaaatccggcgttgcccctgacaaacacaccatcaaacacaactcctaccaacttctccataatccaaattatcgatttttcaccaatattcatattgtatcccgttacggtgcttgtactcacttagtcatttattactccgttactcagttatttactcatttcttagttatttattagttattttactactgttaactatttactaagttaaatattaagttagataataaattttgtaataagttgttagggtgtggacgtgggattggaggtgttgttggagtattataatgtgatatttctgtgttgtggctgtgaggactgcaacgagtttaaaatcccaaacgaacagttcggcgtcttcaataatctcaaactcatacacttttacaattcactcccaatcaaccccaatttatacaataatctccaaatttatcaaatcaacaagtttagacaagataattactccacaaattctgacactgtaggttctgctacccgagagggagctactattcataggggagagggagctaacttactatcaaggggagagggagctaataatatacccctagagggagctaataatatacccctagagggagctaataatatacccctagagggagctaattctaatactattaactatatacccctaaagggagctaattctaatactattaactatataccccaagagggagctaataatataccccgagagggagctactattcatagggaagagggagctaacaagggtgagggatctagtatagaatcatatttatcatatttaactgggttggaaagtgtgagtattggcgtattgggtagtggtaatgtgtgtttggacataattcgcatgttagtgaagagtaagcaggagctggaacagctggaagttaacccccggtacaccgaacttatcaacaacattaatatcaagaggataacagttttcgccagaagctctctcaggaattccaaattcaccaataacgaactacactctctattccaacataacatacacattacacattccgaaccctcacttcatagtgtcaacaatattaacaatatccacacagttgacacagtttccaatcgtaaggaactgaagaagcttaagttgtttaatagttacagtaatactaacagtgtgcctgagggagtctgggtggatttcaagtttaacactaagattctcaaagtcataaataacacacaaaaccacatccagtccattctgtacactactaaccgtgatactctggagaatactgtagagagtgtggaaaacactgtagagagtgtaaatagtgtagaaagtgttggtgtggatttgttgataaagtgtataggatataatagtgtgagtaacggtgggatattgtgtggtatagacaatgtgcgtgtgtttggtaacggctgggcggtaaacaactgtaaaggtgacttggccaacataattctcaactcaattcacctctccaaacatattaaacagatttcacacggttttcaccattttgacaacgatatcctacacctcttcagacaacattttacaccactttagacaccattttacacactttagaggatattttacactactttagacatcttacactactctaaacattacactttagaggacattttacaccatttagacaccattttacacactttagaggacattttacaccctttagaggacattttacaccatttagaggacattttacaccatttagaggacattttacaatattttacaggatattttacaccactttaaacacattggatagtgtgggcatgaaggagttaaaggtgttggaggatgttttagggcttagattccagcttaacagctgtatacacatgggtgacagtgttaaggaagtgttagtggtgaacaggtataatttgttattattgagtacccagagtgagataaagttttatgacattaacaacgtgatcaacgatttaacccttgggaattgtcttcacaaggttgattttgacagtgttgtctccatcaaatgtactgaatttgaggattttgaggaaaataatgtaaaatctgctgctaggatatggatagagttggaaatgagtatagtaatatatgacgtggtaaatttacgtgtggaaattgaatatgagaagaaatcccctttaaaatacttttactgtgtgttacaagggtacgtagtaataatctgtgggaataagctgaaaatgtacaaaaaagacaagaaaatattctctcacaaattcactaatagtattactcacatttccaacacacagtccgacacattgctgctcctggatgaagtgaataatatattcaaactctcacacactggacagagtaccacagtaaccccaatgtcatttaccctagataagacactgggtgacaattacaaggttgttagcctgtgtcaataccaaaattatgtaataatgtcactgtacaatcaaattgactatttattactagtgtgtactgcagagttggaggtgataagctattctcttaacgaattgtatatcgagtttgatgctgctgtggatctggagataaattacttcatcctcaggccctggaacttactcattgtttactcaaatcactccacctcaactctctttctctccaataatcctcgactcatctcactcaactcggacaccgtagataacactgatgagatcgtggtattacgtatgttggagggatttggagtggagagtgtggagtacggcgataatttgaggaatttgcagttgtatacaaattacgtgaatgagatttaccgtaagaattcactggccgacacgccgacgatgaagaacccgcacattctcttttctacacagtgctccaacaccgtcacgctctactacaccgacatacactttgttaactccaataacaatgaagttggtgttctgactccgttaaccagttgtgacagttgcttaattgatctactcaggagtactgttaacggtgtgaagaaaaatactatagaagttgctgctggagttgatttggaacaattatattcaatgggtctgaagtggtacgtggacaaaaagagtttaaagctgtttgaatcgctgttaaacgttttacacttctttcacacttcattggaactctctgatagtgttgacaatggggacagtgttggagttggggaattgtcaaaactggtggacaatgactacattatcatcttcaggaatcttctcaatatacaacataacatgctgttactcctggacgatagtgatactacagttaatagtactctaaattctgctgctaatactacaaatattgctgctaatactacaaatattgctgctaatggtataattactgagttgaaaaagttggtaaataataacataatgagaatagagagagtggaagagtcaatggtgaaggaagtggagaatgtgttactgtacacaaaccaacaactcaaacacctacaccacaaactacacaacaccaactttcatctctctatcaacacttctaacaatgtttatagtagtaatactgttaacagtgttaatagtgttgatagtaatagtagtaatagtgttagagatgatagaggtgtggtattagagttggagaggagattggggtgtgtggtgggggagataaagctattgtacaatcaacctgtcaacgtcaacactactcaatcacccaaattcatttccaaattcaacacacacattcatactaccgattgtaatttggatatcactagtgtagatgcagaggaaaataatgtaaaatctgctgctactggagacccagagggagctaattctaacactgtaaacactgtagatagtgtgggtattgtggacactgtaaaaataagtgaggaaaataatgtcacacaaattgctgctcctattgctgctacaacagataaagtgggagtaaagttgtttggtgagatagattcggggtttaggctggggaatttggagttgactggccaattgtgtaatcccgtgacatttaacactgcgctcactcagtcacaggaacaaacgtcaatcttctccacatacgccaacaatcaatcactcatcgatatggcccattcaatcaccagcaactcttttcccaactcttttacagggtttggtaacactattagtagcaatattggcagtgggttcaagggatttacgggaggatttggcaccgctcaaaactctttcccccgcactgtaaaccctggtaacactactgtaaaccctgtgaatagtgtgaatagtgtgaatagtgtgagttcggggttgggagatgacagtttatggctgggaagtagaaggtatgatccgctaaattagtatactataaaaataccccgactccccggaattcgacgctatcacattctacttaatttttaccccgactccccggaagtagtagctaagagagtttacttaatcttatacccaaatacctattatatagtaattataataataattataatgtgaaaatttgcaactgtatgcattgaggtgtgaactcgtgggaacatagtaaatatttaataaaataaagtgaacaaaatggacgtgggactggtgagggagatgtgttgtaatttggagtggcagcagcggaagatttgggaaacgtacgaggaaatgttaagttccctgaactctcagcaattagtcaacagtttgcaagaggagaataaaataataaacgccgagttacacataaaaaatcagcaaatttcactcctgagggaggaaattaacgcgctaaaggaggagattaacgggctaaaaatggactcaaagaccaagtctgaaacgctgtccaatactgaacacgccctcctaaaaataaaggaagaactggagggagtgaaatacgcgggaaacttaatcctgaaaacgcataaaaagcactttacaaacctgctacaaactgttaacagactccttaacactgtgcaagaatcacgagtttacacagtggaagaccctgtaaacaagagtaacattgaaatgctaatagaaatgaacgacaaattagtgaagctaacggtggaaattatgaagttactctcaacacgagaacacaattccacactccaattcaccaaacaattcacacaaaatttttaattaattcattttaatttaatttaattaatttttttattttccaatttttctatttttttatatttatctccctctacccccgtcaatccccgtaaactaaaaaaatttttttttgtatttttatataataaaaaagtaattaaattggtaaaataataataatttttactgtataaataatttaattgtgtaaaataaaatttttggatggatgggaggttgagactgggagagagtgctgtgaatgacttggagagtttggcgttgatatttaacgtagacttggagtttatggaaaaactcatcaaattcctaaacctcagcaacacaaccacaaccgaagatctcatacacaatctcatcttcacctggcctccaacactcgtcttccaagatttctaatcttccacactattctccaattgttacgagttaacaaattaaccaaattgttgtcaccagtagacaataattctgttgtcacgagtatacaactagttgtcacgagtttacactttgttattacgagtagacaaaatagataaatttgtaaaaatgggtatatcatatccttgtggtagaagattgtgtgacgtggtgaagctcccgttgttgaggaaactgtccccgaaacggatttcccagctgtggcaacagtactacgagtcaactccttatatcaatgctaaaataataacttcgtcagactatgtgaaaattcgtgctaacagtcgttgtaaagaatttgtgatccccgtgcccaaggggccggggaattactttaatcttttcctccaatttcacgggaagtctgtgctctacacttctgtacactccgttaataccaggggcattactaatagtgtgcccctgatggtactaacgttttatgacgagttggaagagtcgcacgggataatactactgcgtagtgatgtcctgggagaaataacaaaagaggaatcaatgagtgtgttggagaatacgttgaagttttatatcgactttaatctcttccagtgggtaaacacttttaactccaaacccaaggagttcaactatgaagactacattaaacaaaataatcacatcttcaatattttttaacactttatatcgtagtaatagtaaagtagctcactcttctctaagctcactctacccttatattattagctccctctcggggtatatatctaagtagctccctctcggggtacccttatattagctccctcttggggtatacagtaaggtagctccctctacccctcctcttttaatagtattagaattagctccctctgagggtacataattagggtatagttaagatagctccctctaggggtatatagttctaagtatatagtaagatagctccctctgcccttatattattagctccctctaggggtatatagttaagatagctctccttaggggtatatagttaagatagctctccttaggggtatgtaattagggtattagtactataatactatatatagtacatagtgtataaataggtatggtactatagtatagtattgagtatattatagtatattctacttacaggtaatatttaagggtttgtataagtgtcctggagtatccagctaaaataaagtaaatatctatattaatactatactatactatatatactatagtattatatgtattatatacatatgtataatatgtatatgtatagtagtatgggtatagtaggtacaatatagtataccaattataggtattaatacactttatatatccatagtaatcctatttaaatgttgtttacagtataattaacctcttaaatcagtattttgtgtgtgttggtaagaatgtactggccctaccaactccctactagcctacagtgtacactccacatattattaatattgttaaatatggctacagaagtccagtataaagctgaattagtcaatggtaaacctgtgttataccgtagaactaactttgaaggtccctgggacgacattacacacactctatataacgtagatcacctagagttatatgatttagatatcaagttaactagtgtatcacagtgtgcaacaaagttatctggtcttattttcaggatattcctgaatctcctgtgctaccacatcaagtacggtgacaggttattgtggtcctactgtgcagatccttttcatggattaccaattcaaatcctattcaatctcaagagaaatactatgactttagtgtttagtggtaatagattaaaaagtttgagtatggagggatatgagcatactgactgggtgaagcctgggaaaccacttaccagattcaagactgaacgagtaatatctcataaggggaaattagtacagttgtttggcgagaataacccgtgtttgggagtgaaagttcagtttagaactttctggttacataaagaaggagagccacttccaatctcagccttcatcgacaatgaaacctacactctcgtattcccaaataattacacacaactcaatctcccacagtacttctccacacttctcacacaataatatattacacacattatatactttatttactatgtatattgttaggagtatagttaagagtatagtatatatattgtatatagtatgtagtatagtattataggtattatgtgtctgggtttaagagtatagtaatagtatcttaagtattaggtattagttagtatagtatagtagctccctcttggggtatataaagtacagttaagttagctccctctccccttatacagttaaggtatagtaaattagctccctctaaaggtatagctaaggtatatagtaaattagctccctctcggggtatatagttaagatatagttaagtagtataggatattagtcattatggtacagtagtataggtataggtgttacgtgtctgggtttacatattagtaacactatactaacatagtatattagcatatatactattagctccctcttccctctatagttaactagctccctctacccttatattattagctccctctagggtatataaattagctccctctcggggtactatttccacagttatttagccctggaacttagttagctccctctcggggtatataattagggtattagtactataatactatatagtatatacatattaatatatactacataatatatgtatagtactataatactatagtatagtaatggtgtagtaaagagtataaaagattattgggactgacttctgatatcgtcccaggttttatatttactttcctttacattttccgattccaccaacttattacccaacacatcaccaaacacatactcacccgtacctcccaaaccattctcactatttacagagtttacattgtttactgagtttacactattaacagtgttgatagagtttacagagttaacagtgttaagagagttaggagagttggtggtattagggtttggtaggtagattgggtcgatatcgttgttgatgttgagttctttggtgctttggagtattttccggctggcgttcccggcagggccgatactctccaacaactaatccaacaattattcaacttatttactaactaattgggaatagttgactgcgtaaaactgtgtaaaactgcgtaaaactgtaaaactgtaaaactgtaaaactgtaaaactgtaaaactgtaaaactgtaaaactgcgtaaaactgtaaaacagtaaaactgcgtaaaactgcgtaaaactgcgtaaaactgtaaaacagtgtaaaactgtgtaaatactttgaggtagatattttttcttagcctgttgatagtgaagacggaagtgtaaagaccaataaaaaccgataacaaccgcctcgaaaccacattcggaatcacattcatcctaatcatcaaaatattaatattattaataattaattaataataaaatgataaattgataaactgataaatagtatgtggatgagagagactgtttgaagattgagttggagatgtatccggatgagactccggtggagagtgagatgatggatgcgtttttgaagtgtttggcttcttcgcggctgagattccgcgaattgtcggacaaccacttggtaaagtgccgctcaaaaatcggccagtccctgtcactaacactcaatttctcattacccaatgacataattttcacaaaatttacctactaatttcatcttccacacccaacatcacacattcacataatttacacaatttacataatttaattaatttaattaattatatgttaaataataatataattattcaataataatacaattaattatatgttaaataattatgtgttaaaatgtttgtatgggtaagaggaggatagataagagtaatgtggtaaaggcgttaaaggagataaaaaccgaagataaacacaatccttccaacaccaaatccaaccgtaacacaattattacccaattattaacccaattaaaatttatttaattagttaaaatttatttaattagttaaaattgttaataatcgttaattgttggtttagagttgggtgatgagtttgcgggtgcggttaggtttgtaccgcagcaggttcgtaagaggaataattaactcaaactcggtgtaaaaatgaatgtgtcgcaacggcctcggaatactcgtgagtctgttcgttttatcccaaaatctcccgattttcgggtataaaattgacaaaaacgccattgtactcaggaataaattggttaactttaatctaaaccggaaatttcgccgtatttcctcccgggtaaaccctctaactactgtaaacaatgtgaaaaatgtgttgggggttgagttgccaaatacattaactttgaggactaaacttactaaatgttttccagtgttgagtgtggactttggcagtaccgttgggctaagtttcaattatctgaacgagtttgagctgtttaaacccgttaaattcacaaactacccccagctgaccaaggatattaagcgaattgttaactatgttaagcggaaatttgtcatttctagtctcattgtgctctttgggtttccctacaacactggccattttagtcatcacactctctcacatggtaatattagtggagacgcggttagtacagacctgagactactatttcaaatcttgttcactcttgactttagttcttatttcgcccactgtaattgtgtcagccctggagatactggggacatcgttaccaaatgtgtttactgttcgttattccctggtgaggcatgtgtcagtggcagggattgcagtactaatgttaacttggaagattatttaaattctgacatagttttaggcacctcagaacactacaccacctttcagaattcacacattaagaacactgtgaatagtgtgaacaatgtaaactctgtaaacaatgtggatagtgtgagcaggatgtgtgaaaaggacggtatgagttcattgaatatatatgagaatttagtgagtggtggtggttttgtggtattgccgaatgggaattgtgtgtttaacggcacaaggagtaataacaatttactctaccaacacatcaaacacaaactcactcaatctaatccacactattacatttctcactatattactcagtatactattttacactattaatcattggtatattatgtttaggtattactaattagtatattatgtttaggtattaggaataggtatattatggataggtatattatgtttaggtattggtatattatggataggtatattatgtttaggtattaggaataggtatattatggataggtatattatgtttaggtattggtatattaggtttgggcattagatttaggtattactaattagtatattagacaatagtatattatggataggtatattatgtttaggtattactaattagtatattagacaataggtattagttatagatattagacaataggtattagttatagatattagacaataggtattagtcattagtatattagtcattggtatattagtttacactattagtcagtatattagacaataggtattagttatagatattagacaataggtattagttatagatattagacaatagtatattagttatagatattagacaataggtattacggataagtattactaattagtttattatggattggtatattagacaataggtattatggattggtatattagttttaggtattatggattggtatattagttttaggcattactaattagtatattagacaatagtatattagttttaggtattataaattagtatattatgtttaggtattatggataggttagatgatgggtcagggagatacagattgcagctacagaacttaaaggtaaggctaccagtgatggtgtacttggtacacttgctggtagtgctgggactctggccactgaagctggaaaactaactactagtcctactaatgccgaaaatgtaattgacaactacaacctattagaaggagaatacaatggaatgggtgataagtctaaggtgaagtctgaatttgaaaccgtaaaacatatatatgaccgaatgctcaacgtcaagaaagcaaatctacttaaagcagaatttggtaatggtacaaatgataataagattctgcagagggccaaggaactatatactaaagccaacacactagccactgccactaatatatctagtaaagatgaacttaaaaaacttgccgaagcacttgctactgctgtaggaaaaagtgagtcagaaggtctccaaaaggctctcaaagcactcagtaatgctagtgtagattcggatattgttaaaaaggccaaagaggtgatcagtaagtacgactctgtcaacaaagcctacaatgctgttaccgcaaaacaagctgaatatactcaagctcttagtggtattagtgaacaacagaaatatagagatgttacatctgatttcggagcacttgaaagagcctacaaacttgtcaattgtaagactctcaagcttatttatgacaaacacctcatcgaattctgtattagttaggccaaaaaggccatatatggatcaaagttgagatatagaagaggaccaggagacttaaagtataaagacgtaggatatggaccagacacatattgccacacacacctaccatcaaacaacaacttagaacactcactacctaacaaatacaacaacgagtcagcattgggatactcaagaacctcaaactccataggaatagacttactaggatcaacaggatcacacttaaacagttcaagatgcttatggaatacagcagtaacttgaccagacacaacaggttcagacgcaggagctacagctttaacaactggctcaacaactttggtaacaggttctactacagttttggtaacaggttccactaactcagttactggttccactagcttggttactggttctacacctcattgactggttctactacctcattgactggttctactacctcattgactggttctactaccttattgactggttcactttgttttgtaactgattctactactgcctcattgactggttctacacctttgttaacaggagttaggggttaaacgcttagtttcttgtatgaatctttattcttggcaacgtaaagctcgttcttaatcggatcaaactggaacatggtaacatcatagcctggatgatcactttgtttccagatttctttctctccaagtttcacttttctacacttaactccaatgaactcataaatgaaggcaaaactgctttgataccctaggactttaaccttgtaattggctctctttatctctacatccttatcatcaaagaacttgactttggatatatcatgcttctgacccgtggtattgttccacggcttatttttaccactcctgttaaaaactaaacaaccaccgctctcaagaaatattgctaaattatcattacccttagtaacgactatggttccaaacaaatctttggattcccaaacgacatctgtaccctttacaaccttgttaaatccacagccagacttcgcagtgtatgtaggatacttatcattactcttggagtactcaaactcagttgtacctgccttcttatcaatgtcaagagtaacctgtttactggtaccagttgttgtaggcgttgtaggcgttgtaggcgttgtagccgtggtagctgttggagctgtagttgctgtagttgctgtagttgccgtagttggaggagttggagtagttggagtagttgctggagttggagctgtagttgctggagttgtagttgtagcagctgttgtaggtgttgtagctgcgggagttgtcgtagctgttggagttgcaggagttgcaggagtcgactcagctgtagtggcagttgtaacaggcgcagatttggctggttccttagcctcttctttagtctctggagccttatctggttccttaactggtgtcgattgtttgggttctatcttcttgacttcatcagcttggttcttcacaaagaatttatttgtggtaagaccaagtgtaaacgccttgatctccttaaacttcggatcctcatcatgtttccatactacgtcatctcccaacttcaccttctgacatttgacacccgtattaaatatgaattcatatgataggaaagccaaatttaccttataatctgatgactttagttcagtatctccctcaccaaagaacttcaatttcttcaaatcaaatctatcggcagtaacatcagaccattttttgccagcaggtttttggaacagccggaacatatcatccttgagtagtatgaccaagaatatatcaccgttagtgaatttcttagtcctcaccatagtaccagacacaccatccttacactcccaaaccacatcacttttctctgaaaccttgtcaaacacacagtcgttcttcccattgaaggtcttaacattattatcatcagtgaattcaaactgatctgtaccctgagatttatcaatatcaagactgattgtcttgctaacagtagctggagtagtggcaggtttggcctctgctggtgtgggtgtgggttctgatttggtaacaggggtagatggttctgctttagcaactggtgttgcagtcactttagtaaccacttcagcttctaccttagcctcaggacccttgccaattggataagatggaccatctttgattggagcacttttatccttggtaattatttttgatttccaatgattattttccacgaaacaggtataataaactttttctaaattcacaatgattttatcctcatcctccttatatgtcacgaactctggatattccttactatcctcatatttccaaacacagtttccattgtgagcaattacttcacacttaagtccctctaagacataatcatagtcatcaaataacttctcaactttacacgtctgttcaccggatttactggaatagagcttaaccttatctggtgctgcaatcgacggtattaatagagtaaatttaggatcaacaaatgatggcctggcagtatcaggagcagcaccaactgatgttgcagtcactttagcctcatattctatcttattgacatcaccagacgggttcttaatgaagaaacagtttgaagcaagacccagtgaaaatactgatatcgtcggaaacttcggatcgtcatctgatttccagacaacttcttcacccagcgtaaccttaacacatttgacaccacttttgaatgtatgactaaatgacatgtcaactatagttacatcgtagtctgtctccttcagcacggtgtctccttcacccaggaattttagcttggtgacatcatgcctcttggaagttatgtcggtccattcatttacttcctcttggaacagagtgaatgtacgattggtcagtaggactacaaggtaattgacacccttggattccttagtcctaaccagcataccaaaaacattagcagcagatttccaaatttcatgctgtccttcagataccttactgaacagatgaccttccttgggtgtgtatgtgacgactccgttctcatccttgtagtcatactcggtggtggtttgtttcttctcaatatccagagccaccttggccggttccgtgggtgtgggtggaggtaagattggagataccctgggttgagtaattttagcctttattgcccctttatattctatcttcttaaactcagatccagtcttatatacaaagaaattattggaaacaagccctagacccatgatggtaatatctttaaatttaggatcatctgtactcctccacaggttatcgtcaccgtacattatcttacggcaggtaactccactgttgaatgttagttcatatgagtaatcaacaatgtcaactccataatgagttataggtcttagaactgcgtcaccctcgccatagaaactcaatccaccaatgtcatatctcttgtcggtaacgtcttcccagggtttaccagcagtctgtgtgaacaatcttaaagaattgttcgtacagagtattgacaaatatctaacacctttgatatccttaatcccaaccctggtaccaaatacttcatcttttgcctggaagatagggttggaaccctgtacgattttctcgaagacatggttaggcttaactacgtacttgtgatattcattatcgacgtaatagttgaactgagtagtagtctgtttcttctcaatatcgagggtaactttggtaactggtgcagctttagttacagcagcagatacaggaacaatgtcagagatccctggaacagctgccatcttcctcatctgcacatcctttgtctgatctttaagatttgtcacactgaatgagtttttacggagatccaagtatacccccttaggatacccaaactcagtgtcatccgtgtggctccacagtaacatatccttttgcataatcatcacacatctgacatcatttttgaactcataaccatatctacattcgaaaacaattggctcgtaatcctctctagtgagctcatggtactttgaggtaccttcatccagggagaacagcctcacccctgagaagttatgtttattttgagttatatcttgccaaggcttattctgaccgctcttggtaaggagcacaaactttccactctccaacagaattgacatatgtttcacatccttgccagagcccattaagactactttgaggccatagtccctatctttcgcagaccatatcttaagctctttcttgacaatgttagtgattgacaaattggccttaggattaaagtgaccaaatcccctagtcgatctatagtcaaacaggtcattattcgaatttttaccgatatcaagagtaaagccagttgatgagatccaattcctgccaaccttatgggcgtgtataactctttcattttccaaaaatacgttaacgtttttaatacttgactcgacaccatagactaccaccttgctagaacactcctgatcagtttttgcatcccaaaaagtattaccagaaatacatccactgaggaagacatttttgaataggtatccaggtttagcagtaaaagtcctcctttcaccatcatggtgaaaatcatagaaaatggtactggaggtcttgctaaggcttaaagatattttgttggaaattgcgtcccagttacttcctgaccaatgaaagtgtaagatctggccatcaaacaggtatacagtaacataatcggccatggaacctatttctgtaaagacctttgtggcatacttttgggggtccttagtttcatagataaccctagtattgctggtgaccgtgttaaacatagcagcaccctttgctgtgtagaccttaatatttctgcgataatctatactataatcataatcatccgtactagagttactgtagatgtgaagtgttacgggtcggccagaaggagttgcagcagcaggtgttccagctgaaggagtaactgctcctccagttacttgaggtgtagtagctggtgtaccaggtgtaggagttgcctttgatggagtaccttcagttccacttactgtacctgcaggagcagttgttgtaggagctggcctggcctgagtaggtttaaattccagtttcttaaaatcagttttattcttcacaaagaaagtgttggaaatgagccctagatcaaacaacgtgatagagtcaaacttaggatcatcactgtgcttccatacatcatcatctccaagtttaatcctcttacatttgactccctcattgaacttaaatctgtaagaatactcaacgagggtaactttgtaattagccttggtaatttctctatcattctcccctaagaacttgagttttgtaatatcatgcttggtagaggttatgtcagtccactttccatcagttgacaattttagtagtacaaaggcataattatcgagtatcattgacacaaatgtaccatccttatcaacaacaaatatgactctcacggcacaaatgttatttttctgctcccagacggtggaggctcccttcacaaccttgctgaacactttccctttcttaattgtgtatgtatgacagttatcactctttgagtagtcgaaatcggttgcaccagccttcttatcgacatcaagggtgactgatgtgccagaaggagctgacttaggagttgatacaggtgttccagttgatgtaactggagcctgaggagtaggcgcagcttgagcctgaggagttgcagttgcttgagtaaccgcaggttcacttactgtagctgtagtagcagttgaaactttagtatctggatctttagctggtgccggagccgtagttgctacaggagttgccttctcaggagtaacaacgggttcacttacttgaggtgtagtagttgctacagtagatgcggtggctggagtcacactagtcgttgttgttcctttaagttcaatttccttgaattgagactcactctttagtacataaaatttgtttgaaatgagaccgagttcaaccatcttaaccgccttgggatcttcggtactattccaaatttcttcatctccatatttaatcttcttacagctattttcattattgaatgtgaacctgtaagagtaatctgctatggttgctgagtaatcactcgatgtgagttccttgtcactaccatctaggaacttcagcttcttaacatcatgctttgtagaggttacatctttccatgtattatcctccaaatggagcagattgaacgaattgttactcagtaggactgccacgaatttaccatcttcatcatctattaatatggctttagtaccacaaatgtcattttttgcctcccatatgccagttgttcccttggtaaccttattgaacacactgttatctttgggagtataagtgtgacaatcatcttccttgtcatattcgaactctggagtggactgagtcttagctatatcaatggtaactggtgtgccagaagtagttgacacaggagtttctgcaggagtaccctcagcttgagtctgaggagttgtagtagcagaagtttcaggcgccttaggagtaggcgcaggttgagcttgagttgcagttgctgttctacttactgtggctgcgggaggagttgttccgggtgttgtggcaggaggcgttgtaggagcttcctttggttgagtagttgcagttgcttgagccttacgaggaatgattgttcctttgtaatttatattcttaaaagtattttcatttttgaagacgaaaaaattgttagaaacaagacctagttcaaagtgcttacatgcctcattcgtatatttccaaatctcattatttccgtacttaattttcttgcagctgttttgatccttgaatgtgactctgtatgagaattcaaacacggtaactaaataggcagtggacttcaactcagtatcattatctccatagaatttcagttcagtaacattgtgcctctccttggttatgtcagcccacgttttgcccttatcagagcttttaaatagtacaaaatcgttgttcttgagtaggataacaaaaagttcatcctttttccttttaacaagggttccaaacacaccatctttggatttccagatgtccgtagttccatgagtaacattaccaattacacttccagacttaggggtgtatgtatgataatcactcttcttggagtactcgaactcggctgtggactgtttcttatcaatatcaagactcacagacttagtattagttgcagatgcacttgattgttgttgcgatgcattttttgctggctgactattggattgacttggtgttgcttgagatggctgagttccttgagtaagactagtacttgttgctttaggtggatttgattgtgattgcgattgacttgctggagtttgaggttgcgatttaggtgtagaggattggtttggagtggagccaccacccttaggtggtccactgccacttgatggagcttgtgccgattctacagccttccattgagcgagcaatgtaatataaaacaataaatttacggttataatccattttttcattcatgcgcggcacttaatgtccctaaatatctaacatttttagcaaaataacaagcaatcgtagccaccttaactatagataatgtcaaatatttatactcttaaagttgatctgcagcaatccgagtctctagaaagcactgtaagcggttaaactataactaatctcactacttaatactcttactaaactaagtaaatataattaaatgtaaaaaattaggttgaaagttaaagtgttatttgattggattaatttgagtgagaattaccggaaatttaccctaggataagacttacggccacgattgtgccgaaattatcgtacaaaaactgaagagccaggagtgctccgataataaatacacaaacaccaatcttgagaacacagcaagaagctctaaagaaacccgaacacattcttaaccttaatatcttttaataatatttatacttggaattactctgaatctaatagcttataatttataatctttatattaattgatagatccaaggaaatagatgaggtaattttagtgaatagttagatcagatctgttttaagaatggaagacaatgcgcttgagagtttatttgtggcgaaacaaatctgcatggctaaaattagtgaccttaacgggtgtgacttaagctccaaggccatttcacttgggattagagctataaaacttaatttgacgtctagttacttggaaactgccacaggtcccgttaaagaacttaataaagatgcaaaatttattaaagaagctacaaatattaataatggaagagtgtacaaagccacatgtgccctggccttaaaatttactgaaaaagctgcagtcgaagtgatcagctcctatgaagatttacgtcaaaagtataaaataatgtcaaataaacctcaataccaacttgtaattgagaaaatacaagcgggttcaaaattaaatactgaggaaatggaattgagagatatggaagcagcatttaacgaacttacaaatgtatatgacaccatgttaaatttaaccaagatcttacactatgccaataaactctcgagtaaatgccacttttctggtcttaaaaattttaaaatcgacgttgacaacctgataaatgagatgaaagagtcacgggatgacccaaatctaatccccgaatcttctcaaaaacttcaaaaaatttaccttaaactacaagaatcatacttgaatttaaaagctaatgaacaaaaacgagttattgatgaaatttcattagtctactcagctgttaaccacatgttatcagatttggaatatcaaacttttccacacaagttcagtaattttaaaccagatttaaccttcaaacacgaaaacaggattttacaccaatatcaaaactaaccatgaaacagttgtggaaggccaacaaggctctggccagggtaaaactgaatctcccctctttataactccgtgaaataattttaacactaatattttacaactaattacttaaatatggcaataaatatctaatttgtatgagataactttgataagaatgtgtagaactttagtagcaagaggaataaaataattaattggaggagctgtgttgcgttttttacatgaatttaaatgtgttaaaacaggattaaacagtttgtagtcacacatttggcgagaataacgggtaacatgcaaaagcatgtacgaattcgtgttactgactttcgaacatttaatagcattaagatatgatttcaaaaatctttgtcaataattagaaattatttttcatgagaaggttttcaatctcaaaattaattttattatccttaattattacacatgtgtgtggtgctgaaaataccgtagattctgaagtttcagcacacacccaaggccaaacatctgatcaaactggttcaggtactgaattaaccactgaaaacccaggagaaggcgctactcaaaattctgataccactgccgatacccccgaagatacacaaaaatctgaagattctgaacaaccagaaaacactgtagaggattctgaacaacaagaaactactgtagaggattctcatgaacaagaaactactgtagaacattctgaacaacaagaaactactgtagaacattctgaacaacaagaaactactgtagaacattctgaacaaccagaaactactgtagaggattctgaacaacaacaagaaccatcacttaccattgctgaggaccagaaatctcaatttcacgattcctcagttgagcaaactactgttacctacccgactaacctaaaacgggtaaaacttgaccttgatattgaagaggattcagctgatttttactatacaaaggatgagccttggtccacttacactcctataagtggtaaaatctttaataaagttatcttttcagtgccttacgtttctcctgtggttatctggaaacccgcaactcttaatgaatttgccactaaagttaaagtcttccgaacaggatcaataattctttttgttgacatttctctttgtaacggtggtagaaaggtttttagaagatatttaacagaatccaaatggttagatgttacttttccaccagatgtcaagttatttactcatcgaagtgtcgtcttggacccaagtaattacacattaaaagctcatttcgactatgaaactatttatacttttactctcaaagaaggtgccaaatgtagtaagataaaatacgagggtgagacaatttggaaatacggtagaacttatacttcttctgacgggaacaatgtaacatgttctttgtatcccacttgtattacgtatactgtgaacatatttttgggtaaatttaacttgaggcattacgaagttcacaccttcagagtctcattcagcgacggttcttttgttaactgctctctcggtgataaaggctgggaacatttttatcatccaaaactaacacattaagatcctcacattaagatcctaacactaaaatcctcagtaaaatcctcagtaaaatcctcgtacaatgaaggataaatattctgtacggtgtagccaatgatattctgaagtgtataatacataagctaataaaattagttgataaaattagttgataaaattagttgataatgtattgtttaatttcttggaggttgttgtttttaattgagtatggcatgaggtgaagtactactccgatgtttttcaactcttttaagctgttcaagttggaaaaaaccttcgccagctggcctgagtcgtcagttgtcgtcgatatcaactccaattctaacaacattaacttttctacttcatttacattcttactattgtacacatcactcttattacacaataccaacacactcacactctcagcaacgttaaccacactcaacttaacagtggcatgagtaataagattgtatagcaagagtgacagttgtttaattgattttctgcaggtggagtctaaaatcataatatatttacaccttttaaacttggatcccagaacctgggttgagtcagtgaggtcatgcaggttgatgacctttttatcaagtgttatttggactgtattattagtttgtgacgctactgtgagtgggaatttattatttacaagcttaaacaggagacaagtctttccagcattactcgggccaagaattaacacattcgtctcctcactcaatattctcctcaacatccttttacccagtaatactgttaacagtagtatcagtagtattgggaatagtttggattttagtaagtttaaattattgtacagtgtgctaacaggtgagtcaactgggactccagcctccattgtcattttttacaaaagtataattactattagagcttataaatcttacgttaaccttgtcaatagtaaaattaaaccctaaaaccatgtgaatagtatgaaaaattacgtttatcctcacgcctctttaaagtaccctcaaataatatatacgtaaacctaatgccaatatttatgtatagttaataactaagataactaagataactgtgtataaatgtgtataactgtataactgtgtataaatgtgtataactgtgtataactgtgtataactgtgtataactgtgtggtataaatacttgtcgcgattgatggtaagtaactgagctttgtctgttaactcttcattaaaatcttgaattaacaagtccaattcacccaacttcacctcacctatactcaaattatgccaaatttagtaataactgagttaactggtgataacggacttaaaagggactgtatgtcttcggaaatgtttgagagtttaatgttattaacaaacgtgaagttattgctggagattagtactgaggtagcgtttctaatagaacttattacgtgcttcgtgagctcagattctgtggtaattggagctattgacgttaactttttttgttcgaaatatttatataaaaacattaacagaaggattggaattgattggaagagtagaaacttcaaaaaaggcttcagtctcctcaaattcttaaggaaaaagtaaccctcattatctaatcttcgggccactatctctccctcagccaattctccacctaattctccacctaattttcccctaccgagtgttaattttatcttttctttatttatttccgaattattaaaattaactgttccaacgttattcccagtagaatacgatgaaaaattattaaatttgttatattgaattgtgttaaattttggttgatttaatctgttggaaattgtgagataatttcggaaattactccaaattattctactagacatttacttaaatacattaaaactttggagaaatcagtacaaattatattatgagattccaacgtgggtaacaaaaccaattacaacaaattatccaaataattaaccaaataattgaattaaaaatattaaattgttttaatttacaaatcggagatattgtttaaataagcctgtttatctttagccatatccacagctctcgcctattaacacattatcactaatttacactattcactaatttacactattattacactactattacactactattacactactattacactattattacactaatttatggtataatatttctaaaataatgctaaattagttggattgaacgtacttcgaaccatctttgttcgtagttattacctctgatgacaccgtcccagcggtatccaggctcaatgttaaacctattcggaaccatactaaacctacatctcggctcctcactctctacacaatcattaacgagttgactcagtaaatgagtaactagtgaaggtatgagtaagtaactgagtaaataaatgagtaagtaaatgagtaaaatagttacgttggttggaatttgtgttaattggatcactccatctctttttttcctttaattcttcatcgtagtcctggtcaatatcaaaactgaagtcatttttaccccgtaaattgagaatacttagttaaaatgagttgaacatacttttgaaaggattggttaatgattttttgttcctcttttaagatttcttccttttcttttatttgtaccaggcctttaccccaaaccagctcctaaatttatagacttaaacttgaaaattacctgtttcggctcctctcttcccctcttttccctctacaaattattatacattgtattaaattatataaattatataaattatataaattatataaattatataaattatgttaaatgatgttaaattatgttaaatgatgttaaattatgttaaataatgttaaattgttgttgagttgatattttcttacgtgattgagtaggagccattgatctcttgttatacgttttccaaacttgtcacgatacacaatgtcatcctcatcagccatctcactatttaacacatttttaacacatttttaacacatttttaacacatttttaacacattattaccatattatcaacaaataatacataattaagtgtataaatagtgaataaatagtgaataaatagtgaataaataaggggtgtaaggggtacttgatggttcttcggggcggtgagggtgacttggatttctctttttcctctaaaataaataaaattttaaaattttaccatttttaagttgttttaaaaattcagcttcgtttacgaccactggtaagtcttcgtcagattcctcaaaatttagctcgtccacgtcctcctcactcttggcagtgccgtaataatcttcctgttcaactatcttaaaatttttagcatttctactcttcataatatttacaaagtgactgtggacttcctcacatttagccttccacggggttaattttaatttttcattatgaagtttcgactagatttaagttctcttgaattttattcaaattttttcgatttttcctttatgatttttactctttgcttttatcttctattcctgttcaaggcgaagttggcaaataatttaaggtttaacaggtatattttctcagcctccgtcgttaaggcttttttaaacctttctctctttgataggctaaatttatacgttttaattttatgctcttttgcctggtttatcatgttcaaaggcaccactaacctaacaccactcaggaccatgatctcaaagtttcccaaatctcatccacacaccttctcacaccaatcctaacatctcacataagattatatttcaccctaatcttaagattttcacataaaattgtaaattttcacataaaatcgtatttcacataataaaatttgtaaaataatcttttaaaatatttcatattacatggtataaaatcagtttaagcgtttaatggcttcggcagggttcatggatgggtattccatgggtttctcctggtcttcaggtttcgcttcaagtttctgctctagctgactaataattttctttgccaacgggtcatttttacccttgtatctactgagtatcgtctgtttagacaggctcggatcaaacgcatcctcttcatgtgagtagggacactcttctcctctattacaagcgcctcgaacccaaaatgtacaaatcctcggcttatttctacgataatacggcgccacccttgcgatctttctcaatatctcgtcgttacctatagttactcaattatacaaattaatatgtgatactgtttggttgatagtttgatggattattttgtatgtcatttagtttatatattaaattcttgttcgagtctggcaactccaacgggttactcgagaatttatccctcacctaaaatatataaaataatgtaaaataatgtaaaataatgtaaaataatgtaaaataatgtaaaataatgtaaaataatgtaatagttgagaaaattacctggatgggcagcccgtattcgagatcaaataggcaagtttggcatagatttttaactttggcacaaatttgacagataattgtctgtttatatctcgctttagggcctggtttccatctgaagatggtaaaaggacgttcacagactttacattcccggcccattgtatgcttcatcatacgaattaagggatttggacccagacaagtttcacataggataggaaactctgatttctcaccctttaacaatgttatgtccctagcactgctatccattatttaaaatctcaatattaaaataaaatatttaccgataaaaatatattaaaaattaatttacacaaattgttataaataaatattataacggaactaatatggaaaattattcggagaagtagctaaacaccataacacagaaggtaaataatccaacaaaattatcatcacattacattaaaatttcaattatttactcataatttaacataaaaatacaattaaccagtttttattgttagttgactgaagaaacttagtattaattatttggaggcgtattctagattgtataattgtatgtatttatttgataatcctttatttagtgagggatcaaagaaaacagcttgactttcaatgccgcataagtttacgccctttttaatcttgaaatagccttgtacaccccaatttgtaccccaagtgttcttacaaatccaatactttacattctcaccattcaccaattcctctccccagccaaccaccactatcgcatgattcgtatactcccaccctaaacattattaactatgttcaacagaaattatataacttttaattaccgttgagattactatgtggtaaatcacagatcattccgtgtttataattattatcaaatatccctaaaataacacatatttaccagttagttaccatgtttatagtagaataattgaggaggtgagtatattgctacggctattggtccatttgtgattatctcattcatcatattcatctcatttgtacattcataacagcctccaacatatccataactgtcaatatacctaaagatttattcaagttgtgatattaccatttcatatcaaatttgatatcttccagagtgcgcagcgtgttgagaaaggtctctgagtcagagtgaattcctaactccttaatatgtttcccaacaagcattaaaaatccgccaaaacaaccctgcgaatacgcctaacaatattaatagtattatatcataataatagtaataaaatttggatacggaagataaaagatcgtgaatggagagtttgaaatgatttaatttccaattgtagttgggatacaacttgttaaataatatttgtagtcttttacttatcacatataatgaactgtatatataacaacttccacactcccctataacacacattacttattataagttggatagatataactctgtggataataccttgagaagtattgtatatgtcttcttctagaccattaaatggatcaccccaagtcctaaaccaatttcaaactgtttataaatgttaattttataccagtgggttggaaatttcttgttttggagtaatttattagtacatggatgcaccatgttaaaattgttatttattacatgataatttacacctttacacaactgaacaaatctaaacggtgccaaattctcatatactaatcccgttttatcataatttaatggagttttatcattatttaatcccgttttatcataacttaatgccgctttagcctcagttaggcttgataactttgtcatttcacttccatccactgactgattacccagtgcatccagtaaattgtgtgattgatatttttgcgatgagttatagaaagttaaatcgacgatataatttttcttattatctttataatttaatttctgcatgtagaaacaaccgaatttgtagtcgttattattccttttactgtaccatccgatttgtaacctgttaggatcagttacataacactttatatgaccaaactcatcctcaactatgtctgaacattaaattaatatttattgagaactgactttgtgtgatttgtttacattcgttatttttaacattattatacttaaaataacctgaatcatcattaatctatggatattaccaaagtagtttttatcgttcatatctatcattacaccctcatcatacaccatagtcctacacatcattattaactgtaagcaaaattgtatattagttgtaactactgtaaattgcgtggtataagataccaattaccaagaatttggttattttgtgggcttttggctgagaaataagaccagttatttctgggatatagcagagatctcctaaagtaccgttcatcagacaactcaagcaccgattcgttcaattcaccgtaaatctcctcaagatactctttaaagttgtcaattttcaaattttcactgtttttattagggaatgtgctgccacagttctggaacacatcactcaactcagtctcatacaccttccaaactccaataacatctttctaaacccaaataattaacaattactactaaataattcaatatataatgataatttatgtgtaaatgtaaaattttacggttaatgtatgaattggcaaatccgacttagcttgcgatattaaaagtaaaaaactccaaacataaaactttaatttacacactttgaataacattgaaaatgaactcagaatccacaacaacatccactccctgtggtgtcaacaattattaaaaattcatttattatatgtttttgtaccatattttttcattttaaataatttatagaattatataatttatttaccaatcaatttaatttaattttatccaataataccttggaaatgagtaatttgtaaactgacttaactttaacctaatcctgtacactaaatcatgaaaatctctaaaattattaacatttgataaaaaatatgaaagacaatttagaggaagaaattaattttaagttggatttggacaactatttatcgcataatgacactatttcttcgagctcagacactaatattaaaccgaacactaaatctcttcgaaataaagaaattgaaaagaattggttcgctatcagtgagaaagaaccaactccagctgttctgcgggagtggcgatctatacaattacgtggctttgttgaccctaagaaattctacaaaaacacccgaagcaaacttgaaaacatccccaagcagttccaacttgggactatagtaaataaatcctacaactacactgaagaggataaagttaccaactccaacactaacaccacttcatttagtaagaaaaagaccagaattagaaagaaacccactctgattactaatacaatcaaggaaggtgagaaatgggtcactaaacggtacagagaaatccaaactgagaaaactagcggccgtaagggctggtaccagagacaacttaaaaaacgaaaaaagatataatattattaatatatcatacacagtagtatatttaccttttatcagttccatgtgtaattgacgttctactcgacgatttcacagattccttcacgggagcatttctaggcgatgtctccttagaattacccgttttgggtgaagattctttagagccagtctttggtgaagtttccttggaactaacacttttcagggaagtttccttgtcaggaccacttctaggtgaagtttccttagacattggatttctcggcgatgtttccttggaagttggattcttagacgggacattaacgggagtgcttggagtggtgacaggattagaagcgggattacttgacggagtggcgggaatattaattacgatgtatttattttgattctggtacatctgaattaacttaattagcgtattggatggcactgtcacatcttgccaattattctgtttggcaagttttaacacgtttttcaggaaattcaacacctttaaacttgaatttaccgtaatcgggaagttactcgacactttatttaagaagattactacattttttatttctatccaacttcgcttctgtggtaatacactctccggctccgatgccatctcactctctgctgaattttttaaatcaccaaccctacccttatcatccttcacactactggcactagtagtactattagcactattagcactattagcactattggtactagtgggaggtttattaattgagaaaattgagagtagtatgaagtattcccactttttaataacttgtaggagttgttggtacttgaattctctgtttggttggaacttgaaagtggtgcagaaacaaggattatcgtacaccaatttttcaaaagcttctctattgttcacccagcccttaataaggtgaaatgagtgattaaagaagattgagaggttaatgacctcacgttctgtcaaactgctaatcatcggtatgagcatcttggtgtagcagttgacgaaatcaaagtagttaaagtagttcatcttattctccattatcaaatccacaatcttacaacagaatagtgcgtttaactctgacactaatagtcttgagaacacaattctacttatgaacctggttgtaatatgtggtccgaccttggcatcattcttcacaaacgacttgaaaacttccttcaacctctccaaaaccacgtttgaatgggttaaatgttcttctttatcagtttctagtgtggttatcctgttctttatcctcttggctcgtctgaaggtattaccggcaccagccgttgttattgtcgatagaaatgaagttaacttagaaacataagtgtcatactgttctgttggagagtaaatatcataaatactcaagctgtttataaatcctacaaagttgtcatccaacattgtgtccactgagttggttgtgaattccattcttttcctctttaaacttgaagttgactgtgaatctgtagttaattcacctggttctttcacagcctttactgtattcataaactgtaggtgattttcagtataatactttaacagcagttccttactgggtaacaaatgcgtttgttcattaatctccaaaaagttaatcagcagaattactaagttgttaaacttgtcaacaattgccaatagtagtttagaattggtaaaattactatcatacagcaattcattaataagtctccccagtatcagcagaagtgaattaacgaaaaatggtctacaaactacttttactagggatttcttattatttactgataccacttcatcatccacgttactcactaagcattcattttttagagagtaacttccacattgacacagaagttgttcctgtgtcatcttattcatgtccacgtctaccatccctccaattatttcaattaatctaatcaaataatccaacacattgtaaattacaaatattacgttataatagtttccaatacatatccctgtgatttccaactttaccagatcttcattatccaactttgattttaagttttttggatctggaacatctggttgcccttcggttgatggacatagtgttaagcgatttgacattgagtaatttagtatcagaattaagattgtcacaatgggtataatatcacattctgagtgtcttttatatattttacacaatattacactgtttaagtacatcttattactctcctcctcattcaagttatagctgtgatctagcctattatcactaagactatactctttcttagcgtcactagatttaggactagtatccctactactggaggctgtgggattatttgtcaagtgtatcaagtttatcgtgagttgatatacgaaaatatcaattgtgtatgatagaaaatacttcgtcagctcacacagtggtaggagtaaattgttaaacagctcagactgtctgattattagtgtacacactgaaaacgggttaattgcactgattgctgttattattgacactattgaccgtatcgttgggctttttaccgacttcaaaagctcaaatgttatcttcttgaatatattcctcagcttataattatacgtctggtacagttttcttatcatgcacatttggtatttgtagtaataattctccagttgactccagttacttggttttccactcctttttggactattttggttcaccttttcttcaccgtttaacaattctaacgtttttgagtatatttgatacctttcaagtgttgtgaaaaggttaagaatactccaaatcctatctgatatctgaaagttaccttcacagcagttcatcacactgaataaaatatacctgtaaatcaactttttaatcattttcttccccaatacgcatttgtcattcttgtccttaccgacttgtgttatcagcaggtgactgagtagtgtgtgcaaataactcaaaattccattaaaaagtatgatattttcactacttctgaacccaactaatttaaaataatactccaacttttttactacaaccaactccttatccaatagttcaagagttaatttaactgaatcaacttcggagccatttccttcagctgcagcctgataaagctctgatttactcaacactttactcataatgtgagttaagttttgtgtcaccgtggtattaaggaatattggaaaattaagcctatacaggtgtaaaatgtatgaataacagacatcccacaactccccttcaaaatctgaacattgacttaaaagagttgagagcactaaaaatttcccagattccattgaataaatacaatccctcaggtaatgataattgtcaaactttagcagaattgaaaaatcattgcattcatatttgttcaccatggtttccagcattgtatgactgatttttctcaacttattctccttgtccaactttgcgctcatctgttccttatccttcattctaggggaactaacttggtgtgccctactcgtttttgagtttaaaaaattagaatttaaatgcgatgatactattttcttcaacaaaggtaccggaacacttgagttatccctcgtatccttatttgggctagttttaagaatattataaaagtggtttgacaaacttgtaagtaactcgtctgaagggtccaggtaattataaacttcactaacgtccaagagtttttcagataccatcaaaccagagattttatatatattatcgttagaatatcctgctaaatttacttccttatcactagtcttttccttatccggtttttctttatcagatttttctttttctgaactatttccttctttacctaatcttgaaatcagactatccttgttctgataattatttctcaaatagaggagaactacgtatgaaaccttcttggagggataactcttgagaactttcattacaaactcatctgagtggttatttaacactagccactttaacacttcatacaatgtacgcattggacatagtttatgcataccacttatcttatttaccattgttaccacagtatctgggtccaattctttaactctattctgggtactttgtttcttattagatttttggaccacatcaaatctaaatccgttcctaccatgtttatccactagcgatgagagataatttgaaagtgctgtatatccgtggtaattttctctaaacagattatatatcttaagtacataattgttcttggtcctttctcttattgaaatctttaccagaccttctgagtagttacagctgtccagttttgccgggtctatcactgagattatctccatactcgagactaacccaaaactctcaagagattctaggaatggaagtaaattctgcttcttcttggggtcgtccaggaagaatgaaacaacgtccagaaccttaaaaaccaaggttgaatttttacacactccatgaaacttagttctcagcgcatccacagacgttactgggtttatagttccatttgctactgaacttacaaacttaaacaatgttaagtcagtttcatcctcgaagttttctaacatttccaacaccttttggtctgctctcggggattgcacattcctataaaattctcctcttttaggttctgaggataatgttctggatgccctggattcgttagaattagttttcgattcaacaagtcttgtgtttttgtgttcataactccctgatgtatgagtgtatccatgatttactcttttctgttctgtatacgttgaagaaccttctaattctctttcttcgctgggatttctactacttttactgacttctgaaagatccaggctaccactcctccttctaccttccaatgttagacttcttaggtgttcatccctggaatctgtatccaatttcctctttgaattttttaaaggttctttttgtaacttttgtttcaccttttctggttcttccttttcactttcgtcaattgacttccttttaattctgggcttacctttttccattatttagggtgtgatttattacaaacgaatattttacatgtaaatttcattttgtaataaattcactttgaaaaacttttataaaatttatctgatttccccatcatgtgtaaaaataaatttaaatatacatatacatcaggcagtgtttaataaaattattacacattaaaatatatcctcttcttcttgtttcaattcttctgattctacttccttttctccctcaccggtttcagggcttaactattaaaatattactgggtaaaaaataaatcacatacaatttactgatcatatattccataacatttgttatccatttgaaaatttgtacgttaataaaactttaaggagtttaactaatgttttatttacctttgaaaacagattcttatgccatccgaaatagataatattacaggttttatcgtccgatgaccctctatcctccgctttattaaccaccttcttagcagccgtcttgggatcataacccaattttatacagtcaacaaccgtatcaacaatttcctacaaattcataattttaaccctcattactaagttattctgttagtataaataaaatcatgtatattaacagtgtattgaaaatacctgtgaagaaagagcatctgttactccgtcagtgcactgtactaggaagatgtggtcatcgaaatcaacgtcgtggacgtagaggtccggttgtgaaccaacgatactgtctggcgttttaaaaatgtagtctccaacagttctggaggtagaaattgcgcaaacattcccgtctggtttacgcaaaatagctctccaacagccttgcaaatactctacaagtccattattcttcaaaattcgctccctttctaatttatcatttggtttgtgctcctttgttaaatccttggccacatacttgttaccctctcttacacataaaatggacctcgaatctcccaaattagctaaaatcaacttcaaagaaccgaatgaatctggtccgaagaagaacgccacattcaaggtgctaccatcaaaaatggattttttttgggcgtatgagcaaaaattattatctataatttctatagccttcgatattgagtgtataaacacaaagacctcatcacttaactcatttaacctcttaattgtactataatctttctgtgtaccatctttgtggtctcggttgtccaccacccgagatcggttgtctgtttgtactgggaattcatttattgaacaacttaaattcgcttttgtaaataactttctcttcttcaaagtagagtaagtctttatattttgtaagaaaactgtcaaaacattgttctttaaatgtctcacaatgtattcggcgcatctaaatgtgaatattaaatatgtaagtgagcgttactttgggccgtaatgaccgtcaaaaactcctgaaaagtagcacaaggcatcggaatttgttaacttttgaattgacatggattctctcgttatgaaccgatcttcgttctcaatcttagaatcaagatttccctaaagaattttattaatcgtggaaataaactaaatttataaccaaccattcgagattctgttcccgctatcagatctttgttaaaatccattgaaatttcttcttctgattcattttctagatcgatttctgattgattcggatccccaagttcatcttgatattgtaaatcgacaccgtcttgataatcgtctgggtgattttcctcatttttcgcctcgaaatatgctaaatcaggcactattttttgcgattctatatggaagtatacatgctcttctgaattatacatccattttccagattcatgagtataccatttactatcctctccagaatctccacaaattatccattcgccgtcttttggcacttccaacacatcattctatgtcaaaattattttaaaagttcaaactcacgggtaaatcgatttcatctaccatttattaaaaatagaatctagcaaacatgtacataaacatcacaaaaatataaaattatcacaactaacgttcaatagaaacatttaatttaaaatgtgcgatttgggagtattcagaaattacagaaacggcacaaagggcctaatgtgggattagtgggttgcactcacctttatcacgtagacaattattaatttttctggccttttaagatcaactttatattcttttcccattaattcattaactacatctaaaacctgttgccttccaagagcgtttgagtttgtacgtttaaattctaaagcccaggtcaccactgattcccctttatctgattcttccaaaattttgctactattattattttctttattttccgatttattatttattttatcttcagtcatagaagattcttttaatgaaccttctttgtcagaatttgccagactaagtggaaactcttttgaaattaaagatttgagggtacacctcagatcttcctcttttgcttcacaaatataatccacaggaacaattcttgatagaaatctggctgaataactcttgttatttttaatttctttgaatatttcactgacgtatttggaaggagtatcctctagtttcttaaaatacacataatttagcccctttgaaatgcaaggacctggtacaaatctattgaattcctggtttagatcctccagttccgattttaataacatttctttatccacatgatcgacatctcttgaacaagttgaaacgtcggggtagaatctctccgaatgctgtaaaatcatttaaaatgatttgattaaattatttgtaattttttacctgtctaagaatatataaaatttcttgcatagcatctttatgttttccagtaatagaacttgatatcaatatgcctcttgatccaggagtcaatttaccagactcctgcttgaccttctaaaataaaagattaaatccaaacattctaaaattaatatatattctaaaataaattattaaggttgaacatctaaaataagtttttagtgttagataattaggattataatttgtattattaaaccttccatttaggtccagcgtgtttaattgatctcttcatataataacattaaagtataaattaaaatttataataattatgaataatctggataattgttcccaacagaacaaataatgagtatacacattatacatttcatattacacattcaaaacataaatatcacgtaattttgtattatatcatatcaattaattgtataattgtgttattatcacatattaatcaatacatgacactctcataccttaatagactctcacacactaatctttgtacattatgtgataccatgattactatggaatactgttcagtatcacagtctaatcatactactcaagactatcgtggttttgtgacatgatctcattaccaactctagactaagacaaacattacggatctcattattctagaaccaatggattaaattacagttcatcatattctcatcatcaggtaactattggaggatttgttcatgggttttgtaatgttgaaatagatatttgtgtggaggaacacaccgtccactttaaactaccaatgttgattccaatactcatcttaaggtataaacctagatctaaccataataacacaagatatgtcaataataatacaggaattagtataattgatccaaataactgatgagatatcaatacacccaacagtgttccaacacctcgcatctctttacgaactattttaccattttgcaccaatgttatgaaatttatcttgtttttcatgtctgaattcatgataccacagtgatcaaaagtgtcggtaatgatcaataacataccattcccatatttgtagatccaatcgtacatctactatatatttttaaaaccccatccctttgacagttgatctataaatcaaacacactctcttaatcccattttaatacccatcaatatccaggatgaatgttctaactactggaataattttattctcattttacacatgcctttgtatggatggtgctgcaggaggatctgacggcaaagaccctggagataatccacccccagattctgacgaatgggcacatttgccaggtgaagagccaagggaactttacacaagcgatgattgtggctgtggccctcatgataaaactcctgaaggagacatattagtatcagtagatccaaaaaatgggctaaacaataaccatactaattgttctgaatttaaaggcaaagatggtaaaaaacaccgttcgtttcaacctcatctttattgtttttattgtgccgtatattataacggtgaacaagtttggacgatgacagacggtgatcctggagcagtggttgaattgtatcccataaagagatcagcaaaaactatggaaataaaactaagaagtggtggtaaagttatttttcaaaagtcaggaaagaataaaccatggataagacaaaatcctgatgaggacaaggaaacagattaactgactaaatccaaaattcctataaatgtagtttaactgggtatatattagttgttaatgtgtagacagaattacaaattttattctaaacgttccatttaacacagaatatcttaattaatatcttaatatgtaaactcaaatcttaagataacaattctggaactaataaaatttacccaaacgataaatgtaattccagaacacacactcaaattccaacattgttacaatacatttatcatttaaaattttatcactgtacacacacttgtgatacaaatttatcattatccacatgtattattagatgatacaacactgataataagtgttagtaatgatcaataattgagtttctcttgtttatagatcaaatcactcatttatatgaaaacacagttaaaccccatccatttgacagttgatctataaatcagccagattattttgcactatttttgacacactctcattatcaacgatgaatatcctaactactggaataattttatactcattctatctttccacttgtatggatcctgatgatggaggatctgacgacggagatccaggagacaacccacctcctcagcagccagctgaaggagagcaaggtgatccttccgacggactagactgtttatatccttataaatgtagaccacataaaagaaacccagatggaacagtcttgttatcagtagatgcatactattggacgaggaatgcacatcttaattatattagatataaagatgacaacggtgttttacacactgagatttcccctcagtctgggtgtgtaattgaattaataaattatggtgatcgtaatctctggacagttgaagataatgattacgcagtaaaaattgatatagttcctgtagatggtccaaggagaactgcggtaataacactacaaagtggtgctaaaattgtttttcataagggaggaaaaagaagtcgatggaaaagaaaaccttctgattatgtacatactgaaaaacaaaagtcagatgttttcgatccaaaagaagtctatatacttgacgacgaatcaacttccacaagtgaacctgaagaattggaagctcaaattgaacgtgtggaagttggcacagattcagaagacgaaggagacaacccaacagaagaagaggaaggtgatatttcccaagatccacgatgctcatctttcaaatgtaagccacatcctaaagctcctgacggaacaacattgttaacaatagatacattccattggacaagaaatcgacatgttcgttatactagatatgaagatgatgataatattacacaccatgagattcaatctaatgatggatttggatttgaattcatacatcatggtgatcgtgagctttggaaattggacggggaagattatgcagtaaacgttgatatatttcctgtacagactgtagaaaaaagtatagtaataacactaaaaagtggtgttaagattactttttataagggaggaaaaagaagtaaatggaaaagaaaacatacagatgatggaaaaggaactgattaaaggctcaatttccaataaatcttacaaatttagtctaaaaatttgtatatcagttgtaaatttatggtgatacagttataattgtattactagaccttactttcaagaccaaaatgtttaattgttctcttgatataataacattaaaatattaattaaaatctataataattataaaaaattaattaattaatcctaacagaacaattacacatagaaacactcagttaaattgttctaatgctcttatttatctaacatttttttatcacattgccctagttttgtgataatttattttgattcaagtgtttgaattcataagacaagtgttatgatcaagttagcaatgatcattagaatgtgtttcccatatttatagatccatcacacatttatattaaaagattagttaaaccccatccaattgataaattatttatgtgtaagatgactatgaaaattatttccaattagaagcattcattttcaacaatgaatgttctaacatgtggaataattttatacgcattctatcaatccatttgtatggataatgatgatgaaggacctgaaaacaaaggatcaaggggaaaacgacctcttccaaagtctctaacaagtaacttaacgtcaaccgaacaagagtccggtggtgcttctggccaatcaggaggtgcatcaagtcaaccaagtcgcccagctaaccaagctccagatggaacaatattagtgaaaatggatgtaaaaaatggatttgataacccacgtacaaatttacatcaatttggtggaccaaataatctacctcatcgtgagctaacgcctcatcctggatatgggtatagttgtgtaatgtataagggtgaaacactttggactatggatggctgcaattatgcaacaagagttactgtgtttcctacaggtaaaccacaaaagagtattactatcagaatggttaatggcggttcagaactttatagaaaaggaggaaaaaatcaaccgtgggtaaaacaatgaatgaaacaatatgtgaaggaaaattaattgaagaagaaattttgaaaaaaattataaatctagttggcctaaggttatattatatttcaatgagatagttagcattatagattgtattattaaagcttttatttagaaaaagtgtgtttaattgttctgttaatatttaagctcagaaattaaaataataacggaatagctaatatttacacaattaatcattaagataacaatatacacgttcatgttacgatctcatgtatctcttccaattatttatcatattacacacgttatttgaatttatcaagattcataaacatgaatacatcagagaccagtgatcaccattgtgtgctttatgaataacatttggttcgtatatttacagatccaatcacacatctatttattttttaagccccatccaatagatcatttatttctgtgaacaatacttgtgaaaattatttccagttagacatgttcattatcaacaatgaattttctaacatctggaataattttatactcattctaccaatgcatttgcatggatcctgatgatgattatgaatctagagttatcaacgaggaagaacattcagaaccacctccaccgtacgaaccaactccacaaggttttgatcccccgccatatgaggatagctttcaattttttcacccaaatacaccaaacccacaacatcatgatccacctccgccttatacacctggaccacagagttactctttactaccaacatatgaagaatcacaagaatccagtcctccttcttatttctcaaacataccaggatcttctggatattcaggttatgcgtctggtggcacatcagatcattacagtccatcgtcatatggagaaagtgagacaggttattctcaaggagcttctgggtatacaccttcccaaccaactactgtgcagcacctatcagatcaattcagatcagttgatggaacacaattggtagacctagaaacaaaaagtaaatgttcttcatccgacacacttttttcatcatacctagtagaagtacatggaatgattcataaatacactcccaaacaaggtttcggatacaaaaaaataacacataacggtgatatagtctgggaaacaaaagatgatatatatgcgaccaaagtattagtggttggtgttgggttttctggtaagaaaataactatagaatttattaatggcactagcattactcttaagaggaaaggttctgataaacaatggaagccaacaagaagttaagttttattaatattttgttttaaattttaacttttaaattccaatttaatgtcgaacaaattaaattaagtgttgataacattacaaattttactatatatatcgattttatcagttgagaacgtaatatatcaaaccaatcacctgatacacattggtggtacccctgaaacatatctcttctatcaatcaaaattatcatgtgttagcaacaaatcaatcatattttcatagaaatattggtttaatagaggaaacaatatatgaaattagatctggcataacaatactggaattaatatacctgacacatataaaggaggtatcaaaacagtcactaaacttggtgttccaagacaaatatctctttgaatattttgtaatattgtattcagatttgtgaatcaaaataaattcttataacatttcattcccatatttatagatccagtcacacacttatatgaaaacatagttaaaccccatccattcgatcagtgatttgtgtaaaaatcaggtgtaaattatttccagttagaagcattcattatcaataatgaatgttctagctactggaataattttatactccttccaccaatgcatttgtatggataatgatgatagtggaaccgaaaaagaaaggccacagaaatctcaagaacaaaaaaaaccaacggttgaatggacaacggggaaatcaacttccgcaagtgatactgggggagatttggaggctaaaattgaacatatgcgaattggtgccagacctaaagaaagaggccccaggggaaacccacctgatccaggacctgtaaaaaatactccaactccaagcaaagacaagaaacgcgatgattacagacaaccaagcagaacatcaagaggtattgtaagttgtatatcaggttatatagggcaaccaggacaggggaaagcatctggtaatacatcagataattatagttcatcttcatatggacaaagtagtagaaaatattctcaaggaacttctggatatataccacctaaaccagcaattgcatcaggtgattcagatcaattaagagcagctgacggaacaatattagtagaaatagacgcaaaaactggaatgaacaatccaaatattgtttttgatgaatctagagcaggatcaaataaacgttatcatcgtacgtttaagcctctttctggatatggatttaataaggtaaattataatggcaaaccagtttggaaaatggtaggtgatggatatgcaaccttagtttatgtgtttcctataggtcgttccgaaaaaaatatgataatcaaacttgttgattgttatcaaataaatcttaaaaagtcagggaaaaataaaccatggaaagagaaagtaatagaaaaatatgtgaaggtcaattagtcaaaggactaatttccaaaaccactataaatgtagttgaattaagtatattctatttgtttaagatataactataaattgtattaataatccttccatttatgacaagaatttttaattaattcttcatatattgaaattaatataaactcagatccgaagataatgacaaagtcaatataatttacgtaaataacggatgacacgtcaacagactcactgaaatcagtgttacaacacatttctaatttccaattattttgtcatattaagtacgttatacagatttatcttaattttcatgtctgaatcgatgaaactggagtgatcataggtgatagtaattatcaataacatttgtttcccatatttatagatccagtcacacatctatatatttttaaaaccccatccaattgaacatttatttctgtgtaagatgaccttgaaaattatttcaggttagacatgttcgttatcaacaatgaatgttctaacatgtggaataattttatactcgttctacatgtccatttgtatggataacgatgatagcggatccgaaaagcaaacgtcacaggaaacacaacaatcagaagttgtaacaccagaatctcaggctgaaaccggtggattagcatcagttcttacggaacaaccaaatccacaagatgaacagggttttcatggagcttcgggagatgctccaccacatcaacctgtaaaaagtaagagtaaattaaagagaactagaaggtatagatataagccatatcaaactaaaccgcatggtcctaaaaaaagtgacccagatcccagtttatcacctaaaaaattaccactcaagcctagatccaaaaaacctataccaaatcaaacctatgaattaacttcatacgggtactggcctacgcaagcatcgacgtcaacaccacaacctggtccatctagtgaaccagatacaacacaagatagctcaagtaaattaccacaacagccaataatgcagccgccatcacaaccagctcaaccacacgttccaagagccgttttaggatacggtagatataggctcaatgtacctcttcctaagccatggcctcatcccatgccgggccaatatcgatatcatttacgtttttcaggatatcctaggtttcccagacctcaactacaaactccaacacaggcagcacctcaacctcaacctcaaccccaaaaagaagtattagaaccagaagtcattcagttggaagtagaatctgatgaagaagaagagcctatcgatttaacaaaaactactactcaacaacaagacaaggaaacaaaggcagattcatctaccgaaccaaagccaccagatcaaccaccgtcaaaacctgaacccccgcctaaaccaactcctacagatccaaaaaagccaaaaaaagtaaaacttattaatttagaaattcattctaaaataaatccaggtacattccactctgaagttaggagcgaaggaaaaacttatttaatgtttttggcggatgagggttatggtttcataaatattttagaacagggtaatttaatagctggatttaacgatagaatatatgttcaagaagcaattgtcgttattgccaatggattggttatgaaagtggaagtgttattaaataacggaaacacacaaatcattgtaagaaaaacgtaaaacaaacaggagattatttcaatagataaggtttaatgctgtaaaatcatttaaaatgatttgattaaattatttgtaattttttacctgtctaagaatatataaaatttcttgcatagcatctttatgttttccagtgatagaacttgatatcaatatgcctcttgatccaggagtcaatttaccagactcctgcttgaccttctaaaataaaagattaaatccaaacattttaaaattaacatattctaaaacaaattattaagattgaatatctaaaataagttgtgaatatgcacattatattaacgatatacacatctagatacatgaatattctaaaataattttataataaatcatatcaattaattgttgtataaatgtgttattatcacatttaatcaaaaaatgacattcacttagcactactatatttatttttcaacactactaaccagataattttaatttataattttatagtatttttaataaatttgtttaaatatcgcataatatattttaatttttcctctaagactacattttttaatttcaactttatttgactttccttccacagttttacaaacgtaaaattcgaattattatttctcatcaatctctcaatatcgtatatttactatgaataactgtttgggattacagtcctattatactcacctgattgaggactaccaggctcttctgtcacagaagctcatgactaagtctcgtcttgaggctcagaggaatgaacttaacctccgtgtgagagaactgaaagatgagttgcacagcttactagaatcaggttcttttgtcggagaggttgttaaatctatgtgcaatgacaagatattagttaaaattagtctagaaggcaaatatgttgtcgatttggccagcgatattgacgttaatttggtcactccaaacacaagggttgctttaatgtcagattcatataaattacataaaattttacccacaaaggttgatcccttagttgctctcatgaaggttgagaaggttcccgacagcacatacgacatggttggtgggcttgaagagcaaataaaacaggtaaaagaagttatagaactacctattaagcaccctgaaatttttgattcacttgggatatcacaacccaagggagtactgttatatggtccccctggtaccggaaaaacattgctggctagagctgtagctcatcatactgagtgtactttcataagagtaagcggatcagagctggttcagaaatatattggcgagggtagcaggatggttcgtgaactatttgtaatggcgagaagccacgctcctagcataattttcatggacgaaattgatagtattggaagttctagaggtgacgggagcagtggcggcgattctgaggtacaacgaacgatgctcgaacttttaaatcagttagatgggttcgaaccatttcaaaatattaaagtaatcatgtgtactaatagaattgacattttggacgaagccttgttgaggcctggtaggattgaccggaagattgaatttccaaaccctaacgcagaaggaagggaacaaatactgcggatccattcgaagaaaatgaatcttttaagggacattgatttactcgaaatagctaaaagtatgactggctgtagtggtgcagagattaagtctgtttgcaccgaggccgggatgtttgccctcagggaaaggcgcgttcatgtaactaacgaggattttcaaatggctgtagtaaaggtgatgaagaaaggtgaagagagaggcatgtcattcaagaaactttggaaatgatgcagatatttgtgtggaaccacacgccaaatactgtaaactcccaatgttggtttaaacgcggttgccctcacatataaacctagatctaaagatgagaacattggaactaacataatttacccaaataataaatggaatgacaaaaaatccagttgcgacaatccttaaatctcatttataagtattttatcaatgtgcacacacatgttgtcaaatttttttttcattctcatgtatgaatacgtgacaacagtgacagtcactgtatgtcattatatacaaaatttgctttctatatttacagatccaatctcaaatcttgacgaaaccatccattaaaccccatccctttgacaaattctatgcgaaccaaacacactctcttaaccccttttaaatacacactcgttaatagcaatgaactttataacttccggaataattttatactcattctacacctccaattgtatggaccccggagattcctccaatcctggtggtgccagacctaaaaaaccagctaaacaaactcctaaaccacccaaaaggcatccgggtggtcaacctcccggacatggtccttccgcagagtttaataaagaattgcaagataagcttaaacttaggggaaaggctggggggtccgatgacacggtccctgagaaacccaaaccacctacatcccctgaatattcaaggcctagcaaacgtaccacacgtccaccaccacaagatccacctgttcctgataatcagcctggaggatcttctcaagtctatgaagtcagtgatccacaacaatccagacaagattatgtaaatgttccatcaggtggtggtaccggtcaaggccagcaatcatggtatgtaaatgttgaaacaggaggtcctgaaggtcatatagctggggcatcaggcggtgctactagtgatcccatatatgaagaaccaccaaatgaagacgatgaatatgcagctggggcatcaggaagcgatgacggttctgctagttatatagaaccagagtctagtcctcaagctcatgtcgaggaaggtttgtatgcaaatataaaacctgaagagactggagctcatggccctcctagaagttctgaaggttctggcggtagcaggtccggctcaggtaaatcaagtggcccacgcactagagctgctgatggaacacaattagtcggaatagacgcaaaatctggaaaaaacaatccgtttactacttttagtacatttagatcaggaccaaagaatctttttcaccgtcaatataatcctagtcctggttgtgcaattagtgtaattacttataacggtaagccagtttggcaaatgggtgaagatgataactatgcaatggaagctcttatctttcctatagggagttcagaaaaaaccattataataacactaaaaagtggtactacagagacatttgaaaagaaaggaagaaaaaaaccatggaagaaagtagattagaaaattttgagaagattggttaaagggctaatttcaaaaaaatatataaatgtatttgaatcatatatatattagttgttaatgttagataattaagttattagtttgtattattaaaccttccgcttgggcccagattgtttaattgatctcttcatataatattaaaatataaattaaatttgtactaattatgaataatctgattgactgttcccaacagaacaaataaattatacacattaaatgtatacacaattagatatatattctcataattttatattatatcatataactaattgtatagttgtgttgttatcacatattaataaaacatgacactcacatacctcactagactctcacacactgatctttgtacattgtatgacaccatgtttactatggaatactgttcagtatcacagtctaatcatactactcaagactatcgtggttttgtcacatgaacttatcttcaactttagactcaagaagcattacggatctactattctagaaccaatggattaaattacagttcatcagattctgatcaccaagtaactattggaggattgcttcatgggttttgtaatgttgaaatagatatttgtgtggaaaaacagaccaaccactgttagctacaaatgttggtttaaatactaatcttaaaatataaactcagatctaaagatgataaaataggaattaatataatctatccaaataacggatgacatatgaatatacacaacagtgttccaacacctcgcatctctttacgaactattttaccatttttcacgaatgttatgaaatttatcatatttctcatgtctgaattcatgagaccacagtgatcatcactgtatcccatggtcaataacataccattgccatatttgtagatccaatcgtacatctactatatatttttaaaaccccatccatttgacagttgatctataaatcagtcagattattttgcactatttttgatacactctcgttagcaacgatgaatgttctaactactggaataattttatactcattctatctttccatttgtatggatcctgatgatgatgtatttggattcgatcctgatgacgatggagacggaagcatgctccctccgcaccaaagaagctctatgtttcgtgatgatctcggatcatcatttacctcaggttatactaaacaagatttggatgccaaatttccaggtatgaaaaagagtaaggggcccaaagacaaagggaaacctcatcctacaaagcctgtcaagagtaccttaatgccaggaaatgatggtcaaacaggagctactggaggttatccaggtggttatcccactcaaggaccttatggtcaaccaggagctactggaccctatggacaagcaggttacgttggtcaaccgggagccgttggaccttacggtcaaccaggagctgtaccctatggacaaactggttatcccactcaaccaggagcagctggaggttatccaggtggttatgctggccaacctggtccttatggtcaaccaggagctactggaccctatggacaagcaggttatgtcggtcaaccgggagctgctgggggttatccaggtggttatcctccaccaggagcagctggaggctatggaggcggcccacccggtccaggtcagccaagcggtccccctggtcaagctcctggcaatatgcaattgttgaaaatagatgtaaaaaatccaaacaatggtccaaatattatttttgaagaatatatagccggaaagccagaacgtcgtcaccgtcagtttacccctgttcctggatgtggaattaatcaagtaaattatgacggcgaaaaagtttggtcattagaagtgggtggcgattatgcagtaaaagttcttgtttttcctatagggtttaaagaaaaaactattgaaatcacatttattggcggtgaaaaggaaatctataaaaagaaagggcgtaataaaccatggacaaaacaataaatagaaacacgagggaagaccaactgattaaaggcgcaatcttcaaaaattcctattaatgtagttgacctgagtatatattagttgttaatgtgtagacagaattataagttgtattacaaaaaattccaattatatacagggttttaaatagatctcttaatgtataagctcagatctgagcataacagggtaattaatataattgacccaattcattaacaccaacacacacattcgtattttaacaagtcatttcccttccaatttattatcatattacacacattatttgaatttgttatgatccacatatctgaatacataagagaccagtgatcaccactgtgtgctttatcaataacatttgtttcccatatttatagatccaatcacacatctatttattttttaagccccatccaatagatcatttttttctgtgaacaatacttgtgaaaattatttcaagttagatatgttcgttatcaacaatgaattttctaacatctggaatagttttatactcattctaccaatgtatctgcatggatcgtgatggaactgaacctgaaagggggaatccaggtattagactttacgctcaaggtgatcctgtatttttaactacgcttagagtcacccctaatgaatctcaaattcttcacaacattctaaaatcacatgaaactagtaaaaccaaagacccttcaaaaggaactggtcaatctgggatagatcttgacaaaattagaagaaatgagaaggggatccctctttttgtacttacccatcaacttacaccagaagaagctgaaatattgaaaaggcttttggaaactcaggataaaagtggtggtgggcatgatccaagcccagcgccatccgcacctcctgaagaacgacctcctccttacgctcctggttatggtccaccacaaggacaatctggtttaccagggctttcacatttacaaggtggctatcatggatatgggccatatgggcaaccaggggttactggcggttatggaactgcttatccacaaccaggtccttaccaaacaccaggggcgactggtccaccagctggtggttatgttccaccagtccaaggttatacaggtggtgctggtggttatactggacattatgttcctggcggccacggaactggccatccaccacaaggtccttatgctccaccagctcatggaggttatggccaaccagctcatggaggttatggccaaccagctcatggtggttatgatcaaccagtccaaggttatacaggtggtgctggtggttatggaggtggctatcaaccacaacaaggtccttatcaaacaccaggggcgactggaccaccaactcctggatatggtcaacaaggagctactggatatacaccatcagaaggtcaaggcccaactgatcctggagatgacccctctggaccatcagatccttctagatcgccaaagaaagacaaagctaaaaaaaaattacttaccttacaaactaaagatacagaaagttctgatcatattgaagttttagaatataaaattcctcaaaccggtgggaagcaccgtaaacacaaagctaggaacgggtttggatttgaggcggtaatgcacggaaatgtagaagtatggaaaatgagtggtccctgttatgcagtagaagtaacagtaatgggtgtaggaaaacctaaaaaaaggatagatatacaattaagtgacggtactagaaaaagatttggaaagagaggtaaaaataaaccatgggaaccggaagtagagaaaaaatgattaacttgtagttttaatcttaaaatatcggactaaatgtagttgtgcatattatatattagtgtcgataacattaaaattcatcttaaagattggatggtgtagaatttggataaaagttgtatgacttcgtaggttatatgctgaccttgccacctaatccattcgccaatgataatctcattgtttctgttaacatagctgtagatgttagactcattgtatatggatttacaaacggatatgtatccctctaaaagagaacccaaatatttattcgaactagcgttactcaaaatcaaattagatatctcagacttaatcttgttcaactcagaaatatcaccagttttactaacgcgtgagagataccttgataatttaatttcgtttgaaaccgaatcactttgttccgaagatgaaattaagtcaataagggactgaacagggtcgtggttatttgagtctagcaagaacaactcgaattcatccttcgcagtatccactgcagccttacatatgaggctcccgtagttatccatacaatgggccatcttttctattttccacgcatcacaaaggttcgttaatttttttttctcgtaaggaacgtagacttgttggtctatgtcttctattacctcatcaatagtactttgaatcttgctaaagtaggtttcccatttcttcctgtattctaactcgtaaactgtaatcaagatgcttgagtctatacatgacagtttatgtcctatgttaactgaatcattcaaacacctttcggccaaagttgataaaacaagagtctgaaagtcaaagaattgcttcaactttctaattgattctcggtcatagttactccttttaacttcttcctgtacaaaagtctccactatcttcagtgcctgttctctaagagtctgcaggcggtccacttcgtgggtcatcctcgtacctctacaccacgattcgtacagcatgtcaactgagtattccaccttctcgaagtcattcaaatcagtcagaaagccaaaactatcctttggaatgtgctgaaacgctctataattcagcaagtccttcaagtgatactgggatccaaacttactcttgtctagcagaacactctccactttcttcacaaactcctccgtagttatcaggtgtcctgctgagggctggatgttcatgtactcgtgagactgcagcattgtgtaatttacgtttagcttcgatgtgaatccaaatgagaacgggtcatagtactcaaagaaattcttcagtgttattaaaatatacattgtataaaaatccgtttttatgaagctgataaacccttctgaccaccaactgaaactcggctgatatatggttagaactcctacaacatcattagctctattacctactattactctaattattacctgtgtatattaatctgaacttagtataaaatccttcaaattggttatataaaagaatgcgatatgtcagccactgcgtgatccacgagcacaacgttgaaattatcatgcctacatataattttaacactattaacactggtaacaaaatttataagacaaaactaatggtctgatattaatactattactaattacactattaacactaccaatactgtaaattagataacttacttatgagtatcattaaatttattatcaatgacgagtctcttccaaaatccgacaagtacacaaacgagtgaatgattgtcagaactgtgataatcgagaagaatgggattgtgtacttcaatttccttatatttggcacgttcctcacatacgatatatgatttcccacaacacaaaatgagtatagcaacaaactcgatataaaatacagtgaaattagtgttagccctatagacgtgctattcaagttcttcattgtatctctaaacaggttagacttattcatgtagtccatcaacgattgcactaccatacatcttcttgtacatgtgataagttccaaattcttcttactgttctcacagagcttaagaagatcaactctgtcattttccttctttttacatattaaacaacacatacaacaatttccagagcactccttagtacaacaagcacacttactagtacattcttgagcacatttatcacaacaaacacaacactgaccattctgcttagttgcatcacaacaatcacatttcccatttttagcttgacaagcttcacaacatatacagcatatgcaacactttttaccagaagtgccaacagccggacaactacaaccgccagaatccgatggacaacacaaacaacatatacaacacttgcaaccgttaggaggggtcggagtagtacaagtacacggatttttatcagtttttttacaacaacacgtacattcggtagtagtggtagtattagaaccaacttcttcaagcttaaattctctgaaataagctagatggaatattataattgaaagaactccatcatattctgacaaatattgtaggcctttcaacatcatatcaagtaaatcattaattcgagtactatacctacagcatttacaatcctcacttttttgctctgttttaccattacacttacatgttgattgttcacacaggaacggagaacacataaaaggtccaaagtaactggcaaataatccaactgctctagtcattgaaagagttggaagttcggctgcaagggattctttgctcttccccaaaataattttacacacttcattttgcctttgatgtaacttacagacacatttaataaatttatagtacaatgtgcatacacatttgcattcttttttgtcttttccttcttttttttcttctacctcacagggttcgggacatttacatttgcataaaaaacatataactgctttagttaagtctactgctattttccgcataagctcaaatatcaataaaaattcatctgctatccttacatacaccagaatagataacaattcaatcacgtacttttccagaatggataatgaaacttcattagttctggaaacaatcaaattgtcttctaaatcgggagaagtggagatctcttgcaacaactgttttgcttcgtgagaacaagtgaccaaaatgccataaacaaatgttctataatgatgatatttagacatatcacaggcgtcacaattttcaataaatttacattcttcatcagtaaaacatttatcaagacatggactaaagcaaccacattttttctgattttccttggaacagcaatttttcaaacagtttaaacaacaattagattttttactactaggttgggttgatgttgcagaacacggacatgtagaagaacctgatgttgctggtccacaaccacaattggtaccaggtgttgcttcacaacaatgaaaaatatcaggaatcaggcacaacacttcattacactgattgattacacatgttatttcccacattaacaaatgtttcgcatccacaatctccaaatattcgtcctgaagggtcttatggtccaaacaatcatcgtctacatttgaaaaatcagtaccacctctaatcctggatattttcatcttcactgaggtaacattcattaaccgggcactgtcaacgcagtcataaacctcccaaggaatccaaaacccatgctgtaaataacaccatggctgcatacctctaaataaccgaatgttaatggcattattagacatcagatcctcagccattcccttatctaaaaccacatcaggatttgactcgtgtgtaatttttaaaattttacaaatcaaatcataaaaggtgtacggcaatccgcttttcttgtgtaaatttataatcttgactaaaattaaaatgtaagaagcaaaagtaaaaataagcgatgttaaaaattgaatgtgttcgaggttgagtgcctcaagtgaatttaaatcattaataactgacaatgtaagattgttaagaatgggtgaaaacgaccaactcagtgaacccataatgaatacccaacgacttttagagtataatacattcctaatggatcggttagtgaacttagctgcagagatttcatcttctgggctatatggtaatctagatatcaaaaatgatgttatcagtgtgattacagcaaacaccacaaataacctattaaacaacttcaaaccaggatagttctcatcttcggatattttcaagtcaccgctcagttgtaatatgagtttaacaagtagacctgaggtgaaagatccgcagaggaatatgagcaggcttagtgtattattatcgtcatatttattataggagccttcgaaaatatatttaattgttgctatcataagcccgttagaaaccagcgatatgcagaagactggaatcaatgcgaatttgcccaccagaataaagttgttagacaacatgtaaatgtatatagaaactaagaaatacaggataaacaacagccaatgccaatctgagcatactacactagatccatattttattgaaactgcgcagaccacgattccgataactagattaaatcttcttaaaaagaaggaaatcgtttgcgaatcgtaacttgtggtacctaggaatcgtagaaacacatacgattccaaatccaccacagagttgataatcatacagctcaatccggccataaagaatgccagatgagtttcatatctagaatattcactggttcccctcattatctcaataaaatatagatatacttactatacccatttatttggtttaccttttaaaatctatagtaatgtacattacattaagctcctttgtattgaaagtttaaaattattactacatttgaagacttcattatatgataaaataaaactttaaaactttattaataccgattttatattttacagttgaataacctattcttcagtgaaatttagagaatgctcagggagagttaaactaaaaaaataaaaaccaaaatccaaaaatcacaaattaacaaacattaaatatcctttcaaattttaaaactacttgttacatcattatttaattttaaaaatgtgtaaatttaaaaccaaagattagaacgtttaaaatcatcaactagttgtttaaaactgtttgaacaaggccaaatgtatatagatcactgtgaatattataagaaaccaatattttacatataaaatcaactaccttttaatattacataatatataccaattgttacaattcaattctcacggcactacaactacaatgaattcagcctaaaatttcttcattttttaattttattattaaatttatctaaatgttatattttatttaaaatattttaatatcatctctaaattatttaatttctacaaacttataagtagaatctctttcttggaataaaacaaaccaatatacaaagttctaaccatatacaaaaatgtacagaacatataatttctatacttatataattatttttagtatcaaattaattagatagtctatgggccagtgatagtatttccaactttatgtccgagaggtgggataattccgtcatgattctggagcagtcgtctgaaaatttatcaaatttggtgaaatctaggttctgtttctttgccaaatcgacaagcttgtcaaaagagtccgcaaaggtctcttttaaatcctcgacagaaaagatttgtgagcactcagaatacaaatcagttatcgttttaatcaccaggttaacatcctctgttggatcctcagattgtgtgttatcctgaaggtctgtgtacttgaacacccagttaatcaagtggattttgatctgtgaaaatataaagtttgaaaggagctcagcggacttcttcctcagtatcttcgcttccataacacagttctctgcatttattcctaaaactaacaataaatcatagttctttgtatcgtcttcttcagatttaccagttttttgtgtgtggaaagagagatttcttattttaagtggaattgaaaacgtaaagaaatcaagggtctgaatgattagacatagtttcttcacacatagattcttttcaagttcattttctatcaaagtgctaaaatatgcaaaaaggtttattgactttgaaatggaggcacttgacagaaacgaaaacttttctgaaatcccaaagtacacatccaaatgttcgtttagccgaatggatgaatgtattaggttataggttttcccttcaagttccaacttttcaaaaacatcccaggtttcttggtttaagtcttcgtgtactttaaccaaattttgctcgaataccaactctatattcttcttagattcagcacttatgtacctgtgcagcacttccgtcagaaccgaccccaaatccttttcaacaaactgtaacgatactccatcttgaaatttgtgatactttaggtgttttttcaaaagctcagttaacattttttcagtagctttagggcattttgtgtaattctttacagtttccttataaatcttctctacctccttaagactcaataccacagaatctatatcagtaacagcttctccacaaactgtttcaatcttaaaacttgaaaataagttctccaaagctttaacaaacacaccttccatcacaaaatataggttttcgtaataattacacaagtcagttgctattttatcttcggtttccgaagacttattctcatcatttgcagaatcaccatgattatcaatatcagtactagttgactgagcattaacatcactgttgccaacagattccttggtttcttcatctaaatcagaatttatcaaaaacttcagatacatttcagagtagggaccagatttacaggtcattggcaattttaactggttttttaaaaactgtgtcgtttcagctattttctgataatctcgattaattccgtcggtaaaactatcgtgtatttttaaaatcattttcttgcctatctcactcgacttggacgagtctggcaaatactgcccctcttttttgaacagatacacacaggttagtgaatttagtagatgaagcagaaacaaattagaatgtttaaatcctcttagaactttatccaggtgttcttgaaacgaatccattgtgactggggattcagtactgtagttaattggtattattggggtgttcttaagcgtcgaaagtgtatcacttattgatcctgaaatggtcaaaactatcaacactggttctattttttccaaagttggtcttaattccttttcgtatttctccatgtcatcacaagaataacactctgtcagtgcaaaaaatgtcaagtcaataaactttgcttctcctacctgttccaaattactaattgtatccttcaaaacaagcgagactgagttagtgattttaaacttcgacaaatcattttcaaagtattgtattactacatatgcaaaaatcctcgccaaggccatgttgttaatctcaataattccctgaatgtactcaggtgtacaagatatccctttcagcaggtgcaaataatccaaaacttccaaaattctcttcttatacatcaatacttcgtgtaaagtataagatttagattcacttgtttgagagtccattgatctagctgaggatggtgatatatcatcttggtttatctttgactctttactttgactatagttaaccggtgagttgtaaattcctttaagattatcaaaaatacttctaacatttgaaatctggtcatttacgttaacaaatgaggtttttaagtcctctatgcaaacaaaagactgcccaacgtgcttaaggtgtgttccaaccaactctctcaactgagtgtttatctgcatcaactgagactcaagaaactctatagattctgggatcttatcaagtgttttgttgaatataatgttttcatgtatattatagtcatcttcgaagtactctcttgaaacgttatcaatactactctctacaagtacacttggtgattcgatgttatcggctaatttatcctttaaaatgttaaactccggacattctgaataaatctcttctatctggtttaggtaaacattgaaatctgactcatatactttgggaacggtttttatattcttggtaatatcctcaaggttctcaacggttgttttatttcctctaatcatatcaagaaggtgcttaccactgttcccaagatcatcaagcagtgttgcatttaattttggtgggccccaatctatggaggctatagttgcgatattacttgtaattcccaaacccttaagttgctcatccttaataatatagggtgaatctaaggggtcaaacgggttcaaattcgggtctttagaactctttatatcctcctctggaggttcaggtttattctcatggttagaggtcacgtgttgattatcctccgcagaaccaatgatattccttaaaaatggaggtactaaccaaaccatgtttaactaacatctaagaaatttattaaacagtttcctattttacattccatttattttttaaagatatttatctccttgatatatagatttgaagtgaattaatcattttttcaaaaaattaaatctataaacttattttacaattcaaatgttttaatatttaaagaatctacaaattatagactcaaaaataaggttaaaactggaagaagaatggtcagtgcactcggagtatgaaatttgaggaggtgtaaggttcatcagtttaaacaacaattaaaataaacctaaaattaaattaatattattaaaatacaaaatgaggaattttaaacagacatacatgaaaaaataattaatattgtccaaaggcgtaccctcatattacatgtaactccctttatatgatctattatttcgaatttttaatttttcagttatacatcagtagatatattttaaaattgggaaattcagataaatactgtaatttatggcattttaattttgtagcatgtattactacagtcaaaaagtatgattgttatattttaaggaaagaccattttaaagcccatatttttcaaatttgaattaatatattttataaaacgacaagtaaatcattatagtttaatattttaagatccattagatatttcctcatggaatactcgtttgaaattcattccttctaatttcagcaatgtcactgtttgcttgttattctcggccaaatatcccccgagaccttgttcattataataagaaggacctgcaaaaacagtatgttagcttcgttaagaataattcccatgaagcatcaagagcagcttgcgaatcttttgtacaaaaatgcagtataaaaaacctaaatagtataataacactaggactatatggaatccaaaataacaaattatcggttacagttaagaccaatatcgtccagatgttcgtcctaatttcaaaagtccgtgactacaactgccttcttctgtatagatccgatattttgagtattttatacaaatatgcaatggttttaaagactcgccgcccgtattgcttcgagaaagatgtcccaatcttagaagttattaggttttcagagtatgtagtccacgttatcgaggagttctctaactgcaactcgtacggtacacttccagatgacggaataccagtatatattaagaagctttcaaacgaagcaaagaagatcaagtcgaagttgatgaagaagggagtgaagtttaccatgggctcctgggatatgccataccacagaaacgaatcattgaacactttaggtgatagtgatgagttgattgtggtaaaaacgcttggagaaagaaccaaagaactccaagataatatatcttcaattgaagcccaaatgcacagcaataatgtatttgaacctggctcttcagtagacgaatcagtaatttctgaactaatcagctcattgagtctgtacgagtttaaaacacaaaacttgattcaggaatcagtagattcagaatcaatggaaaactacgatgaactaatgaatatattagactacataaaacatttgatcaatactctgaatagtaaaatgtgcatatctttggatcaagaatacatagcaaacaatttgccagaagctattagttttgatccatttgataatattccgtcacaagaacatactttacatgaaaatcaaactgaacaaatggatggaaacgagtcagacgtaagtactgaattgtatgatttcgctcgacaagatgaagctgaatctgtggatcaacaatctgaaactcagagacaattattagatgaacaaatagctagtgaggaatcattaaaaaacaggtctaaagaaatattggaagacaacttcgatcccttcggaatcaattttaataatcaaccaagcacctccacactcagtacagagaatttgaacacatcagttccatcaacagtcgatgaattaattgaccataatttgaacaaacctgcttcagaggatgtagaatatttgaagaagtcgagtgaagctcacgaaagatccagctctttggatgattttaaacacaaacccatgttcagagaagaaaagtcacaggaaatcgattcgcacgaagctgaatcagattctaactcagatgagactttagaagatgaagagtcgatggattcacaaatggatcaattcgtggaccaaaaggatgaagaactatttgaaagtacagtaaggtgtgaatcattcaagtcaagtgagagaaaaccagaagaatttgatttaaataacttaacctcggatgaattggttttggatgatcaacaagttgaagagctggtgaagaatgtagaaattcctgagaaaattgaacctgaagctgatgagaaggaagctgaggaattggcagaaactgaggacattgaaaacttgtataaagatatatcgtatgttatgggtacactgaagagaataaatacatatttggagtcaaaaccgcccaaatttgtagccaattccaagacttatcaagagcttcaggcttcactccacagggactttttcgacaaatacctgacatacggaagtgacaaactttctaagaaaaagttgttggaacaggaggaaaaacaattagcccaggaagagaagaaggtgagagatgaaatcttagggaaagacttattttcaaacatggatgagaatctgtataagagattgtcaaacatatatttgccaaggaaaaactcgaccttttcctcaaatgtcctgccgtatgacaactcattagtgaagtcttcaatatcgtcatcagtaccaccattcccctcatattctacatactcaataaatacctgcattgataacccatacaacaatgctccagtaacaatagattcacacacacccacatcttacaatcctgggcgagatacttactacacaatcaactacaacccggctgatttacaaaaatcgtctgagcttctggacaaaaaagggatttatagcgattcgaagagggctgaaatagttttcacaaaagggataccgtctgataatctaaaaaacaagttgataaaacagtcacaacttgctaaaaggttattgggaggaattgaacaattttcatttgaagaacaggaagtcccagattttgaagatgaaagtgtattttcagaaactgaacatgatgctaaaaattcaaataaatcaactaaactatccatagaagactactcagtagatggagaggacattccagaagattttgatgattttgaaaatcaacctgaacctgaacctgacaattttgaagagaacgtgaatgaatatggatacccaattttagattttaatgcagtggataacgagagtgccaaatcaggagaaaatgagaaaattccagaggatttatatgaaaaaatctcagaaaaagagcctgaaggagaggaaggaggtgaagatgaagttaaagacgactctcaggaaggtagtctaaattaccataaagtattttataacaagtataaatctaacgaggagctttcagatattagctttgatgaggaatcaaaatcgtcatcaggaagttccgataaatcctcaaaatcaggagataaaaaatcgcgaaggaagtcacataagggtgaaaatgagaaatctgagcatgagaggaagcataaaaaggaaaagggtgagaaaaggaaagagaaacatagaaaagaatcagatagggaggaaaaaagagagaaatcacataaaagaaaaggtaaatcaggaaagaaacatgataaagataaaaaacactctacaaatgatttaagagattcgagatatcagcactcagttcacgaatcaactaacttagaaggaagccagtatgattacggaatgccatcgaattatcattatcctgcacaatattacaacatgcctactcatcgcagagattatagaagaaggcgtgaagaatacggggacagatatgccccatcgtattacgaacacgtttcagccagctcacaatatgaagatgcctcctcatttacagaccaatactatgactcatatggttctgaatcaatttatggtcacagacctgatcccagatattatgcttataatcagcacaatacatatgatagaggtgataaatttgaaagagttgaaaccaacagtaaaattgtagaactcagctcaacaagtaatacggattatggatcaaatcatagtggaaatataggtaaatatgttaagatagtaaatgataatgagaagtttgttaagaattttaaaatacaagaaaatggaggaagtgcaaaagatacaaaagatgaggatgaaactccaaacgattctgagaaaaaggaaccagagcaaaaattagataattcaggagcaataacaaacgcaaacttggtcaaaaaagtaattaaacacggaggagatgtgatatacgaagatgagcttttctcagtcaaatttaagcaatacactagatatgagcccgttttgtacaacgaaaatacaataacaattcaaaacaactccatgttttcattttctgtctctttggattactcaaattttgaaaacttcccaattaacctcaagttcctgaataaggatttcaaaaacttgaacattgtccctgaggctaagattaaccagtacttcagcacctattgctttggaccatttgtaggccttccaaaggtagaaattacagcacacgttgatgcaagcactgacaagaaatataacatttacttgccaatagcaatttcctgtttcttcgtgcccaccttagatattaacagtttatcccaaaggtatttcaattctgataagttcagacatatcatgaagaataaggtgtatttcaatattccaaaggtgctaagcttgagagatgtgttgactgtcataacaacttatggaaggtttaagattttacagcaggctgaccagtacttttatttggcctccaccttttcagctcccttctatttcaattctcaagaactgtacaaattcacgatattcgcaatgattgaaatctcacccagctactacaacgttcacatttcctctgattcataccgacttgcaaacaccacctcgatgttgtttaagtatattttacaacagtaattttaatactattttaaatacttgataattagattcataaatattatatttctactcaaattcgtaagtatgtgtaacatctggtgttgattttacgcctttcagatccattcattaagattatgattgaaaatgaacaaaattttaattttagtgaatctgaattctcaaatataaaaaatttaaagccgggattaaaaaatgtatcacttcacggagttattgtggaatttataaatgatccacctcaaagtactactgaacccaggaatttcagatatcattacaagtttgcagattcctcagggagtgtaacactagcagttccacacggaatcctcatggatacgatttcaaagcttacttcttacgtcagcttaacttcaggacacaattcctctaaagttgaacaatatctcttctctaaggtattttaataataaaaaaataattcaaaattaattattattcttaggttccagttttagatttggattcggctcccggtttcacagtcaaagaagtccaaccatccgcgtcaaattccactaagggtgaaatgaaacatatagacccggaatttgatgaagattccgattggattggatggagtgatgacgaggaatcaaacagggaatccttaaagtggttactccaaccaggagatgtaatttatataccttcagccttaaccacatggtcacatggacaaatggtactcgtaccaagtgaatctaaaaacgaaccactgatgaaaatctgtaaattccaaacccaaattaaaatggaccccgatatgagtaaacaatttactgggtctaaagactaaactaacatggaactaccatctcttaacacattacatattttaaagttttttattttttacacattacaatgatccacaatttattataaccacgtcatttacaggcctgtcacctggtccagtctcgactttctctaagtcatccaggtattctgagcccaccatgactttaccaaaaacgacatgcttcccatcaagatgaggtgcaggagcaaacgttataaaaaattgcgacccattggtgtttggacctgagttcgccatactcaaaatgcctctttcagtatgtttgtcggtgaaattttcgtcatcaaacttctctccgtaaatgctctttccaccagttccatctccgttagtgaaatcacctccctgagccataaaacccttaattatcctgtggaatttagaatttttaaagttgaattcatggtctgtttgacacagtttcctgaagttctcagctgttttcggaacagtatcagagaaaagcgcaaaaaccatcttgaatgttgtatcccccagggaaacctcgaaaaatacctttggaagtttgttatagtctcggattcctcttttctctaaaattatcaaattaacacatttaaaccaaatttaattagttgtattaggagtaactagaaaataccgtcataaaaggtcattttagaaaagatgcttccgtatctcttcttatcaacctggttgtaattagactgtctctgtttggcaagtttgaggtaattttgcccatccacattgtcagggtcgagttttagcagattgttgagatcttcaatagctccatccaaaagatcataatttagccttgctactgctcttctgaaaagagcctttacgctattacgatctagtttaagtgcttcagaagcgtttttttcagcatctctaaactcagaaacctttaagtagcaattagaaaggttaagataacattgcagttttgtgacatttgccaacttcattgattcatctggccactcgctcgactcactcagatattccaacccttcaaggtacatggaaattgcacctctataatttccttggctaaacttgttgtttccatccaccttaacatctacggatgcctgcaacttctcgtcaattgacagctcccatttattctttggcttaactctgaagtttaacaactcgatttcaaactaaaaaaattagttattattaaatttacatgtaaaactgcgtttggtggtattgaatcacctgctccagactttccataaccatattctggctgaattacaagtaaagccttctcacccatcttcatcgttcctacgcccacatcccatcccttaattacacttccttctccaagcacaaacttaaatgttgtattacggtcatctaaataattatagatattgttattgaaacttacaggaggaatcaaatacagttccacaatcaagtttccctgtataatgaacttccacctcttcgccgggtttgggtctatattaaaattatctaccaagtttaaactaacacttcatcgaactctgagtgtttcaagacggttttcaaaacgcctccgtctccagatacgtcaatcggtcctcccattttaaatcaacaacaagttagaatgatacaccctttaaattatggaatataaaggaatcctcggccaaatagtgaaatatacctgaaaataaaaacagaatcttaagccacaaatttattgtaaatttaaaggaaaccaacaataatcactaaaaatctcgacaaaatgtaaaatccttctaaaacttacaaaaaataggtttaaataaacaaaattcaataaattgataaaatatacagcaataattattaataataatgataaaatactaacacatatattttgattccttacaccctcataaatgatcataaactaatccattccataattcattttttaatcaaataaaataaaatatttataaaaatgttaataaattctattttaacaccaaatgtaccataatttaggctttatttagttaaacacatattttaaaatgaaatcgcaacgactgtttattctatattatttttcactaatttttggcatcttttatttgaaataccttcatctcttaaagaatgagacaaactctcttaacttacaccggttgaaactatttttaaatttgaaccctaagttttttaaatacgactatattctatattacgaccctaataatcttctaaccaagaagatttctgtaaagttaagcaatttcttatcttctaaaggggtatcctcatcattgtcaaatctcgactctaattccttctatcttttatctgaggacatctcagaccatgattccgaaggtaacattaacatacagtttatataattttttagattctacttctcttgataagaagtttgtggtcgttgttaactacgaggatgcaaacaaaaagactaaattcactctccgcgtcaagggcggaaacacgctcatttttacaataaactccaccacagtttactcagaagacctggtccaaagaatattttccttggcaagcaagttatttttcgataccagtggcctgaaaatgaaggaatataaaccatttctcgatttgaactttattctgctgagtgacaagggtcgtgtttcctgggactttaccaaggatgttctttctccttacatgaataaccttttgtcctcattttccctcttctatgaagtgaacttacacagcagagtcatttctaacgtcgactactacaagaagatggtcttaacttccaacagggaggaatccgaagaacaaagcaacgaagcagtctttgagttaaggaaccaggaaaccaatttttataacttttttgagggaatttccaacactgatatttcaatgaaggatcaacactccttcagacactcgctgaacttttttgttattctatcctcaaggcctacttttctaaaagatcccttcaccggtcaaaaacgtgacagtttcacaattgataatctaggagtatttacttttttaaataatcgaccccaatctgatcattacaagttaactgaagaggatgtttccgaactagtatcgacttgggcaacatacattcgacacatgcacagtcttccagccagcttaagtgaatatgtgctatggctatgtaacttagacgaaaatgtgaagatgatttcagacactgaatacctgatttcaaagggctcagattctaacaatatatccatttctggctcatttcaactcacgtttgacactccgtccaatgtctcattttacaggtttgagctactcaaactttccaagtttttctaccattgttacattaagggggcgcttataaacttgaagaaattgtctcaagttaagaaggtttacttcaacaaccaggttcctaaatccacatctgaatttgtcaaggtacctcttccctaactacaattagctttagttatctaaattctatgttaattcacgatttgctcaattataattccttagaacactttctacgctcttgagtattcgatgggtcacctcttctcacaatctgagaactctctcgacactttgtttcccaatcttggctccatggacatgaaccagcgggccttgtgtctggctaggtttgcctattctcagagtcttgaggctctttctgacgaccagatgttccccaggaacattctttcccatgaacacaacctcgctgttttcatgtgtgacgttttcccctttgtcttcccaattttaatctactacataaggatgggtgtccaaaacctaaagtcacgctaatctactctgtacattatacgaccccaacactagttagtactattaactgcatcaactgtattattccttaactgtattattaccactatagactattaataccactgactatatctataatgaactatactaaagaatagttgcgtattattaataattaacatgaatttggactcaatgaaagcatattgaagggggtcgtaaaaattaaaagcatttacggtgcacaatattggggccactttcgtcgaactcttccttggtgatccacatttgctggaatgtggagagtgaagacaggatcgaaccaccaatccagacagagtacttgcgttctggtggggctacaaccttgatcttcatagtggaaggtacgagcgcgttgagctccttagtcatcctctgaccaataccctcgaacatggtcgtgcctcctgacagcaccacgttggcataaagatccttcctaatgtccacgtcacatctaacaattgagttgtaggtggtggtgtggattccaggggcctccataccgatgaaggtgggctggaagagcacttcaggacacctgaacctttcgtttccaactgttatgatgttaccgtctggcaactcgtatgacttctcaacttcggatgatgatgatgaggtggtcatttcctcgtcgaagtcgagggcaatgtagcacaacttctccttgatgtcacggacaatctccttctcagcggtggtggtgaaagagaatccacgttcaaccagaatcttctgcatgaactcagtcaagtctcttccggccaaatcgagtctcatgatcgcatgaggaagcgcgtaaccttcgtagatgggcacagtgtgggtgacaccatctccagagtcgagcacaataccggtagttcttcccgaggagtaaagtgatagtacggcctggattgcaacatacatggctggcacattgtgggtctcgaacatgatagtggtcatcttctcacgattggccttggggttcatgggagcttctgtcaagagaaccgggtgttcctcaggtgcaatccttagttcattgtagaaggtatgatgccagattttctccatatcttcccaattcgtaacgataccgtgttcaataggatatttgagggtcaagataccccttttggattgcgcctcgtcacctacataggtatccttttcgtccattccaaccatgagtgctggatttttcggtctaccgacaatgctcgggaaaacgcacctgggggcgtcatcaccggcgaaacctgccttaacgtttccggaaccattgtccacaactaaagcagtagtctcttcgtcagacattttatcctgaaaaatgattagaaactggtatgacagggtttgatattgataggattcaaaatattaaaattgagacaaattagcttaaaacgaagtaccttttatatagatcaactaatgagtaatatttttaggaaaataatgtacaaaacaataatttacagagagtttaactttttacagttgcttttagcttatctgtcagtgaagaaaaatataattagtagtagatcctcttataaatataaatatattctaaaacgccatacacaccgatgcatgtggtacattcaaatggatccagtggggtgctagggaaaatcgacgtcaaatttaatgggtgcttgacctgctttttggcccgtgaatcacgaatatttttcttcaggagtaaaattttatatgtagatctaccgatgacacctttttttattattttaattcaaaaaatccttttaaataacaacttccataaagattcacaaaaaaatttttacaacttcccctatttaataacttcacaatttcactagtataatttatctttcttccactattatttcaaattaaaattccttaaaattatgtgtttgtcttttagttttaattaatagatatttacatttttttgatttttaccaacacaccatccttcaaattttacaaactttacaaattcataactagttattaatcttctatcgatattcttattatttttattcatatattataaatattatttaatttccgggtgatcttgtctagaagattctataaaaaaaattaagaatcatcagtttttttacaggattgatatttaattacttgtattttagaaatttctaatttttaaaacaggaattattttacacatcgcatatataacccagttagaatcatttatgcatttaaattgacagtgaacaaacccgagttaatttttaccattttacctcaaaattatgaacatattatatatttaaccttatatttttatttaaattagattgttaaaaaaatattatttcttgaatcaaaaatattcatatatgttaagtactagattccgtaatcttccacaaaccagatatcttaaaatgatttagatttgtggttagtctacatagaattaaagaaagtcgataatttcaaatgttaaatcactaattaatacaatataccacctttattagactttatggaataggccaacaagtctggtcaatgatggcccaaaaaaagtctgaaaccaaatactaaaataagatttcatgatgggataaaatgaagagactattctgattttaaacccccttatgatttattaataattcaattcttatataaatgtgtaatgtgtaaactgtctcagttgattcatgcatatttaaacgacaattcaacaataacagtttaattctaaaagaatattttttaatttatcagatgtatatcataattcacaaaaaatgtaagaatcttagggctgaaaatgccgatatttatttacaacttcacgataatgcaacttctaaaacatttagccacaaaatgcccggaagaccgaagattctggtcatgtaaatacataggaatagtttaaaagaaaacacagttgattgaaatcagattttaaggagattttaaggaaaagggacatgcatacgttgcatgccatttagtgcgcctcatgcctttggtattcttgataaaaacagttgttttaatatttttaacactttaaaaacttaatcttgaaacgagttgtaaggcctaattacaaaggaatttgataacgaataaatcaagaatcacatttacacacttggaactttccggagtggttttagggtttaactactttaaattcaagaaggtatttaaaagttttaattaattaattaattattatgacagttgtttcttgtgggctcggcaaaaccaacgacaacgaatcttctaacagcggcgtatctttcgggttgaactgtggcaacaaaagaacaaattcactaatcacacttcaggtcgttgatacaaaccattatggaaatcaatttgtttctcaacatttagaatcgaaacgatatcaaactctagaattatcaaatcttcaaaaactttacgatttaggcttcttaaatcaggatcaattctctaatttaaatagtgaaaatatgttatctttaggtttaaataacagatttaatttattgtcaaaaaaattggctggaaataatgaggaagaggaagaaaagcctgacaatttcgaagaggtccaagtgcccgaaaatgaagaagctccattcgatgaatcatatcctaccataaagctagatgacaacgaaacttcctcaaatatcgacggtcttttccagaatgtgtcaattgataatgtcaaaactcaaccagtttgcaacttatttggtaactgcttcaataataaaaaaaatccataccaagcctctttgaactacgaaatgttcagattgacaggtatgtttcacttgattttacatatttagtatttgtttcctcaaattaattaatttttaggcgcattaagttctttctttgaacctccagagtttgttgatttggagaccgttgttagtgaaaataccaaagggaaccttttttcaaaatgcctcagacctgttaaatccaaatttgaagataacttaaccaatagtctcaatagccaacaattaagctcaattttatcgcaaagttcattagtcccaggtgacattggttgttttggcacctgcaacaagaagcttaggaaattcgtagacctcgataagctcggcactcttgccacagccacctcttttggtcttaagaatctgtaccacagtttttcctcatttaaccaaaacacatttacttccaccaagagctttgagtcctttccttctaatgcctccaacgaacccaataatttctccacgttccaatctgaaaatttgaaggagaaatctttttttaaccttgggaccttcagaagaaaggagcaggacaggaagttgagacccaaatacaagaatgtaaggccaaacacttttagacttcacgcagttgagatccatcagtatgttcccctgcccaattttcccagctcaaggtttgtggaccaaaaatcgagggttgatcagtttaaatctgacgctaattcttacatggccaattgcttctttaatcctaatgccactggtcctgttgcccccatgatgaacaacattatgaacggagttaccaactacccagatctttattcattgaacacaaagttccaaagacttaacactcaagatttaagcgtatgtgttatgcctctagggtcctccaatggttttaaccaacagaaccctttgagacttgttgaataatttaaatgccgacgtatgtatatgtttactaggtatattatacacttaaggttttaaactttaaaatgtgggaatccggtctgagtattatgtacgttctatccatgttcctaacttctccaaacaacgatttagagaatttatccagtgtctccttactgctgaataccccttttaccacaccttccttgattttcgagacgtatttcagggtggcgttaaagtattcgaaatcgtggatatttcccattttgttgataatgaaatgatcatcaaccttatcattaaacgcgattttaggtgaaatcaatcctaatgaatttaatcaattcaaaatgaatacgaatataaactaaatgggactacaacaacctatgttgttaatgaaggtattaggtttagaaagaaattggtcatttattacagtttgagatcctgatccaaccgtgattccagtttcccagagacaaatatagtacaaatttaagccaatatcagggataacaaggtcgatcctaaaagaattaattcaaattcgtaaatacatttttcgatcgaaaactagtacacaataaaatattgggggctgcattagtgacggtaaatcaacagtagagattttgtagactaaaaaacattcaataagaaggtttaatatagatgatagtttcatttttgttagtggtttaacctattgaatcatatttagaatagaaataggtgtgaggtatcctcattccgatcagtgattgaggtatataatgcctatgtgatttggaagtctaaatagaatttgtcattttagattctacccttaaatcgccatctgataataaatgaacttaataggaacttacaattgtatgaataggccaaatcggaacccggaaatgctagacccagggaaccgtcttgctttgaaaataaaatttttgaaaaactagagattgtatccatgcttttgggcgtgttatacaagtatttcatctaacaactcaattaggtaacaaacaaaccaaggatttaatacaattaaatagaattgggaaaaatcccgatttatttgaaacgattggcgacaataggttaagaatagtctgggtgttaccatggttataccacagatacttagcgaatttcgaaccattttcaacctcttttaaacacacatcacgtgtatactaaagagtttaattcccataatcttaattacctctgccaccgctttacgctccaaagagtattcagttagtagtttcttgtcatcttccgacaatccattttcggatatattttccattagattatcaaagtcaaataaacctgaacaattatttatattagaagattaaatatatttaccttgatttaacgatttagagtagataactctagcaattctccaagcaaggttatatgtgtctgatatacccatattcattccaagtccgccagctggtgccactaagtgggccgcatctcccgccaaaaatatcctacaggtttgtttatctatgaaactttttgcaacatcagttgtaacagtccattttttgattttctgaaaacaattgtgaaattaaaatattacatgaatttttaagtcagcgagtttagttccaactgcttcattaataagaatagagcagtttttctcattaaaatattctgttgtttcgaattccgggaaaaacggaatttgtacaacaaattcagccggctttcctccttgacaaactagtacacaaatacactaaaagtttgtcaagaaatcagtggttacctgagagaaaatgaaatacatcatagctggatttgaagaaacaatctcaccgagttgttccgactcgaaataaacacttattacttcctttaagttagaagtatctttgacatttgaattcacatttctttccccgaacaattcttcagatactttcgaatgtattccatctgtgcctactacaaacaaactgtgtatattacacagggacccgtctcttacgtttcttacactagatacaataaatttatctcttgttaaaaatccctcaaattttagtcctccgtctataaaaggaatggatgttacaaattcaggactagaatcaaagtcagcaaattgagcgaaagttaatggtctgtctagcttcagtaagttttcggctttggaattgtcaattttaaatttagacaatatcgatttgtattcgctctgcatccaggacaaaaattcttttttatcatctttataaagttgagacctatccagtgacaaggattttaaaagaaacagcaatttatgttgagggaagttagcaattctacttgggcttaattcttcaaaatatgtatttttgtatctgtagttgtctataaaagatttattacataattatatgtcaccagaaaaatggtcttgaactgcgtacaggttcaattgtggatcaattacatgtcggcaatacttgaaatatctccataaatcgagaggttccaagaaacactcaaacaatttgtcaacgtgacccagttgtctccaaactattaaataaaataattaatattgaaataactttccattgatcgattactcaagtaatgagctcttggatgacttctcgaaaccgtattcttttcaaccaataatgaaggaatcctcatccgagataacaagagatatagagtagttccgactggaccagaacctactattagtacaggaatcttcagaagagttgtcatttaaaatatatttaggtgtatagtgtaaaaaataaaatttataattaacaaataacattatgaaagattttatattacattttgtttaaaaaacattttactctgttgacattatacatacacattgtgttaagtgaaccacataactaacaagtcattaatccaaatatctttagacagagaatcctcgatattgacttcatttgaattattttttaatccactcagtggaatcattaaatatcaaaccatttattccgatttgtcagtaattaattaaaatttactcactatgtatgtatcaagatacccgacttagcatatcccttattattatagcacacacacagcgctctatttattcctttctgtttcatccgttcgtgatcaaatttccataatgacctcaactcggaaacggaagttcttttttccagaatgtctacctcattttttaatttgaaaaatctactccagaacgttgacctatcataacatctaactaatgatttgaatggattttcagtgtcttcatcctctttgtctgatttgtattgttcctggtcttcctccaagaaatgttctgggacatagtctggacaaaagaatctcacattctcatcttttttcaaatcaaactcgaatattttatcgttcttaactacattttcggaattaacgaatatatcttcccttattccgcatcctttataatttagatatttatacactggatcaattgaaactataatgttttttttatatccggctccctcaaaattttctttcacggtcatatgacatataaaataaattggtcttaaatgactagctgttatttcatagttttcatcgaaaattatttctaggtcactatcagtttcaggacttttgagtatggtgatcccactcgatccaaacaattcttcaaactgaacagtctcaagtttttcaagatcaacttcagtatttggtacattacgataaacagtatttttacccttgggataaaaacttgaatcatacgtatagtttttatcccaatcgctgcaactaaatttcatgtttcttgaattagggacaagttcccaaataacattgttctcacctaattctgaaactctatcattatggatgtatatccttactacatttttcaaaattttactttcatcttcaagtaaaataaaaacctggtttatattagcactttgggttctatttttggttaattccaaataatcacccttgtctgatacatcaaagtaaacgatatcttttgctattggtttaaaatctgattctagtcccattgattctgggtcttccaaataatatatctcggctcttgacctgcctttacggagtgagagactcttgtccttgtggatacggatctctgttgcatccttattcaggaacagtgtacaggatattccatctttttcgagatgatcaggattagttaagtcacacattggtttggtttgatatatcacgtgaggaccatatcctttcttattagtacaactcaatttggttgaattgtatccattacacttacttaaatctaaaattttaatggtttctgtaagctcatataattttgaacccatacataattcctctactttcactacttccccaaatacattcctaaattctttaaagcaatctatttcgaatgtatcttttggaacatcagttgatattaccgtcacatttctgaaaataaaatagtatgtttttttatcatagtttacgaatgtttttttggttcctaaatgcatcccatcaaatttttcatatttaaaattggtaaggataattcgtgtattatttgattctggacattgaaattccatattttcatgtaggccaaacaatacattgtttgttaagtttatagaaacagatggataatctttagaccaattttcatgagttggtttagataaaatttgatatttgatgtttgtatcataactcataaatggtgtagattctaaatatttagattcattacttcgggacccgcaaaatatttgggtctctcctgtatatcttacttctttcatatatattttaatatttaattctttatacacagaggagtcaagaagtatcttatcctcactagtaatatattttggattcggaattacgtttatttgaattattccaattctatccctatttagcaacaactcaaagaacatctcaacggttctgtaacttggtttagaaccgtcaaaatgtatgacgtattgtccatcaccgctttccacatgtattgcttcagtatcttttatgagttctgttttacgtgattcgtcaggttgtgtcaactggtaaggatgggtataatatttaccctcatcaatgggtttcagggtttctttggggttatcccttgaaagagtaatcttgatatattggtacggatatatatcaatatcataaaatgtcatactttttgcatcacctgagtcaaaagattgcatataatatggtccatatcccttaacgatactttggtttgaaagcctaacgtataaaattaaattgataagcagtagtgttattgtcatcttgtattttgtgtatttgatttccaacttaagtatagagaaccggtacaagacaaatagaattcagagagtaatcattatggatagtaaaatgtgtatataaacgaaacaacaaaaaatgagtataactaaataataagtcgacgactaaggattaacaatagtagtttgtataaaattaaagggagacgttaagatctcgtctcgcctcgattcattgtagatatttaaaataaaccgaactcaataagtgaattaaaataatatataggtttaaataaattacctaaaaacaataccctgagtgtgtatgttagtcacgatgtgtgataaaaataaatttttataagtgttaagtagtaagataacaaataaataggttcaaatattttatataaaataattaatattgaaataaatttccataattggattgatatctaattcctaaataatgtagtatctgttgggtattcggtggttcgaataataattcaactaaatttaggtataatttcagatgttattgtttacaatcataagaaaactttaatgatttactgttttaaaaaaatatgttcagtttttagacacacttcaagaatccaatatttattaatgtattttgtttttaagaaatttaaaatcataaattttaaaccaagtccccggtctaaatttattattcaattttaaatgataaaggattaaactaattattcattttgattccgatcagtggttgtatcattgacccaattaatagaatcaacagactccatttcttcgggaatagaaatgtggaaattactctttccgcacttctcattatattttagttgtagttcttctgaaaattcattaaaatcagattttttaagtctgtatttatccaaaatattagattcaaccgtcctatttgtcttcgtatctaactcagggaagtttgacctattcgtgaaactataaagactgtccacaattttttttgccacttcttcttcccgtcgaatttctagcatcctcattctatgagcaattttttggttttctagaatctttttctttagttctttacactctctaaaatatgaatcacaatttttcaaaacggagattgcgtcactcaatgggaactcatctttaacatcatattttctcttcagggaaataattgtgactgaaaccgaaacagaatgaagacaaaccaagggaaacatccattttagagaatccttgtgccacttagccttaaatgagctctcggggactctgggtgagtagcaaatataaaatgatgaaactattgaaaaaacctaaatattaatttgagaaacaattttacctgaatgaaaatattcagaattaaagttaagtatttccagtcgaacaagattaacgatgataagaaagttacaaaataacaaagtacgaaaaatacaggattacgactgataattgatattatcaataaacaaacttgaaataacacagacaatacaagatttgcattccaaagtttttttaatggtatttctttggaggaaagtttcatttggatttagctaaatcatggaatttgtaagtcacagaacttcaaccaaaacccctctacacactatttacacatttatggattaatacaaacttcttaattatttctataatttaagtgaaataaaacaaaaaaatagtccatcgtaattaaatttatgttgtgaataggtataaaaaatagtgtcaagcaaactactgaaatagttataagcatcactaattttaataaaccaaattaaaaacaactataaaaaatgaaatatgttatttaatttatccaaatatgtgttattcttttttatttttgtagaagcctgatttcttagtattgacacttatctgtaatattaattaaaacacaagatccaattaattttaaataatatggaaaatatgaataatcaaataataaaattctgttaatatgctaaaaggcgaattattggaaatatttataagtattaggtttcaatttcaaacaccctttatcaccaatataatttttgggatttatcacatttattaataaacggttgggacaaattccaccaacttcatttactaatgtggaatattgaatttctcaggctacattcacactttataacaacactcaaacacatcaataattaaattcgattctacaaaaaatgattgacctaaattttctatggccaggccgtgagaatgcaagtgatgtcgtaaagtacgctacaagtatcggatggtcgaccataggatttaacgtttactttacagcaaatgaccaaggtgtgaatcaagtcaaatttgttggcgaccttgagaaaaataaaagaaatttaggaaatgattacttcggacctcttctatgtaatcaaatatttcccttaatttctaacacttcaggtgagtccggattgtttttggggaacaattttgttcgtagaataactgtacttcttatggacaactttaaaccaaattctcttctgaaatttgagctttctaacgagtttgagatctttagtgtcattcctaccagcaaacgatcgtttcaggctgcctgccagaatctaaactgcgacctaataaatttgaacgtttattgctattattcaccatttaaattgaaacgtggttttataaactccgctttagaaaggggatgctatttcgaggtttcaatttctgacgaaatggttaaaaatctagatttggaaaagattgttggtacaaaccttatagagccgatcaacctggcattccaaaggaacttacctgggttgttaaaatacataccaacgtcaaaattggtgatatcatcgggaacgagtgtcgcaactaacctatccgacccggaatcatttcttggggcttgcaatgaactgttccgaggattttctggcaaaaatttgaatttaaaatcctgtttaacaaaagtccctaacgattgcattgtaaaaggggcagctagattgacttttggaacaggagttgtatcatataaagagggaaataacctgggaaaaacatttaaataatatagaaagtaaaaatggtctagactagaaataatacttagaattatttttaaaaaagagtaataaaaaagtgtgtagagtataagtaacgaatctgggtgaaaggtgtgattttttgagaaagcggagggaataagatgtgatagtgcaagaattgcctagctggtaatatgggtaatggaatgggccagtatgcgattacaaagataaagtgtggtatataaaaattttatttcgataaaattattaatggaagtcatatgtgggtgtacgaaatttagtgtctaaagaatttctattggtggtgcatgcggtacccttacctcactccgtctcgactattttcatcttcatcatgtattaataatgggtgtctctttaatatcatgattttatactatttatatttaatgtctatcttatagtttagtatcgcatattttggtatctctctcgtttggtttttttgttactttaaaatcctctttgtactttaagtatggatagaatggactatttatttagcttttgtatgaatacttgttctttagactcattttagatttataatctagttttcgagtgatgcttataaatggcggtgctgctccacctaatagcgtgcctgggcttcgtggtcatcccattgccattccaacatcggcgtcttttgatttatcgcttagtgacttaaaaatgagcttctgcaagagggtcatggatacatgttctgatatcatcagttacgacaaggcttgccatactcctggtcaatgctcaaaaacctatacagatgtagtcatgcctgtaacccacacagtatgttcatttttaagtgatcaatgtgctgacctcgatcttgacgaagcggtagaaaagctatatagtgctggagctttaagtgtcgatattaaggataccgaacagatagactcaaagattagagagctaaatgagctcaaagataagattaaaaaggttactcttggtgcacatgctgaacaagctaaaaaggctagggataaatatctacaggaacgaatcgatagtcacaaagttacgcctaagtctagtaaaggcggtgatgcagaactcgggaagaatttggatgtagagactccaaccgtctagtatggagagttatatgataaacaaactgactgatgctgtacgagttcttgaactatctgatgagttgaacatagatttccccaaggtaaagagtaattataaccgaattgttaaatctgtccacccagacaagaattgtgggcaggacaggggccttgattctgttttggaagcatataagcttctcgattattattttaatgtagttttaaatggtaaaatttgccaattgtgtcatttgtctaatatttgtgaaagttctacttactatgatttccgccatgtcaattcacatcaatcatgtcggtactataaatcagaaaattcagtagaagaccttaattgtaaattatacgagtcgaaactgttattagaggattcgtcaaaattgggttcgaatcctacaaatagatttagttgctgttatatcaatagtaaggaaaacctaacttcttccagattttatattgaactttccaaaaactctcttgatgtttttgagggtattccatacgtcacatgtcgttgtggtcagattttacttattacaactgaggccactgcccttggcatccacacatttgactgtgacatatgctcttgttcatataacatagcataatgtaactataggttcataatctcttagagtaccatacattttatctactatctagctcaatccccaacaccaaaaaataaaattacatgttaaataaataaatgccaaaataaacaacttccttgtaatttgtttagaataatatttaaagtagagggtttaataagtttttaaatgggtttctgaaagtaggggtttatatccgattgggtgaacttaatattcagactttcgccccttgcttcgtaattttctctatttaaaagtgcagaggttacgtgagcttttaggtacttaattaacattccagtagaaaagggtgacatatataagttaagccatcgattataatatttctgtgtaaataacttaattaaccttccagaacccttcatttgatttagggatttactagagttaattctatttatgctaacctcgttagcaaaccttatcaattggtgcttgttctgttcccatgcttttagtgcttcttgcttagctcgataaaaatctaagtataaattatctaaactatcccatgatgtcccatgtgaatagctaatatcagccaatctcttcaacctgtttttttcaatttcggataatttaatgtcatcggcatcaatattctcacgcagttggtttcggaatgtagagagtaggttattattttcaaatatgtttgattctaagatgttattttggggggtaattgcctgtgaagatgattggtgggttaaaatgtcataaaatgtaacaaatggaacaaacttttcaaccacaataaattgaattaaaccgttcggtatagggactccgcagattttgtatgtttcattttcataaacgtaatctttattatgagggttataactaggagtttccgcagtctcgtgtgagtcagttgtgtaataatttttagtgaaatagtggtgaaaaaccaggtttgaattggtcaattgacatgtaaaaaaagatttaccttttgaaccttttagttggtttaggatgcgaaagcaaaacatcaaacaaactacgtcgttctactacaaaaattaataataattgataaatatggctgttaaaaactaaattaccttttttattcaattcctcctcttttactttatcaatttctgcaaaaaataataaattaaacacttaccgcaattcattttttcactgttagctgtagttacaacctcatcatcgtcatcgtcgattagtattactttcctgtgattaaagttaaattcaattgtgtggtgttcttcttgttttttcttctcatcagattttgacttaaattgattttgtttaatttcatttgtttcattttccgacttcttaaatagatcttcgttcttatctacacgccccctatcatcttcttcattatcgctatttgaaggttcacagaataaatcctctgcagttagatcaatctcatcttttttgattgttgaactttcctttttaacaacatttgtccccttcccagacccataggtattaggtttacaatccagagcttttggttctctcggtcttttattcgaacttttagccttgttattatgttgcggagctgttaaaaaggataataaagatgtttgtatcttcttggtcttgaactttagcaatttttcaataaacttctccaccctttctttcgaaaagttgttttcttggaccagaaattcagtcagtccctcaggatctatcgtgcccaacttcacgctattctcatcatattcgttaaccttaggtgataaaaaatattcctttgcctctttaaagtcatcgtaatcgccgcctttgaagttaactatttcttccaaattttggtatttctttaccagagaatatgcagtttttggtccaactccttccaaggtgtcgcagtagtcgcaaccgcagagtatacaaaagtcgataaattgatcgaagttaaattccagcccatccaaaaccttttgtaaatctactttgaggattttcttactgctacttgaagcaacatttctaagtagaaacgcccctccgaacaccaaagtgtcagtgtcctcagaagccacgaaacggcacaaattcttggttaccaagtatgcacactgtgcttctgcttcttctaatgcttctataactggaacccccatcagacgaagcaatttctttgcagactcgttcatttccttcgatacctttactgtacggcctactaacttcttgactgactccttatcgccttccgaaatagctttcttcaaactggcgttggcctcttctctttgttggcgtcttttctccagcgttttcgtcttcaattctggaggttttgagtcaaaaacaaacacaggctttattccatattccaagaacttagaacaacggttcatcaacccgtagatgtgacttgtagattctcccttagagttcacaagagaactaaagtaactggagtctcggatggcaattgtaaattgataaagagcagcactagcgtctatagcaagagattctccagacaaactttccagggataattcactaatactggaaggcaccttttcactcaaaaacgggatgagtcctttaattcccatacttatttatctttatttattaatggaatagtttagtatttgatattttttaaaggtgtagaaaaattataattcactggtccttgttctttagtgattttttcttctttctaccaaactcgtcgtattcttcgtcttcagaatcgtgttccttcctatccctagggtcaaaaagatcgaaatagcctcctcctcggcccaatctatcttcctaaaaatcacgttttataatagatatttaaattcatgtaaaaattatttacaatcctacaggttcttgcaatgctctagatatattacagatgttgcaatgtgtcctttttgcccagtttaaatttccacacctttgtatcaagttaaaaaaataaaaaaatacttgttgcaggtccaatctccttgctttggagaggaaacgaggttggaagactgatctataaaaaattgttaacacacacaaaatttttacctgttggtcgaggtattccacaaatattacacttagtgcgctttgaaaaatttaggttaccacacctataggtaaaacgatttacaatgaaataaataacattaaaattaacaactaatgaaacgaacgatgtatcgggacataaccaatcgccttcccttctatccataaataaaaaagggagaattaaaagatgaaggtgtgagacgacttagtccgaaaacatacaaaaaataaaaataacagataaaagaatagtggaataagatgttgacaaaaaacagcacaataaattttattaaaaataaatcatgtgtttacaataatataaaaatgtatagttaataattttaaaaattaggcgagtagaatcctgaaaaatctataggagaatgtgaaatcctctgagataatcacttcgtagaattaataaatattaaaaatattgagtatatagtattgcacattaactacaattaaatataatatgaaatctatttgaaactaaaaatatggaggtttaataaaataataaaaaaaaaataattaataaaaattgaaaaaagaaaaaaagagtaataaaaaagtgtgtagagtataagtaacgaatctgggtgaaaggtgtgattttttgagaaagcggagggaataagatgtgatagtgcaagaattgcctagctggtaatatgggtaatggaatgggccagtatgcgattacaaagataaagtgtggtatataaaaattttatttcgataaaattattaatggaagtcatatgtgggtgtacgaaatttagtgtctaaagaatttctattggtggtgcatgcggtacccttacctcactccgtctcgactattttcatcttcatcatgtattaataatgggtgtctctttaatatcatgattttatactatttatatttaatgtctatcttatagtttagtatcgcatattttggtatctctctcgtttggtttttttgttactttaaaatcctctttgtactttaagtatggatagaatggactatttatttagcttttgtatgaatacttgttctttagactcattttagatttataatctagttttcgagtgatgcttataaatggcggtgctgctccacctaatagcgtgcctgggcttcgtggtcatcccattgccattccaacatcggcgtcttttgatttatcgcttagtgacttaaaaatgagcttctgcaagagggtcatggatacatgttctgatatcatcagttacgacaaggcttgccatactcctggtcaatgctcaaaaacctatacagatgtagtcatgcctgtaacccacacagtatgttcatttttaagtgatcaatgtgctgacctcgatcttgacgaagcggtagaaaagctatatagtgctggagctttaagtgtcgatattaaggataccgaacagatagactcaaagattagagagctaaatgagctcaaagataagattaaaaaggttactcttggtgcacatgctgaacaagctaaaaaggctagggataaatatctacaggaacgaatcgatagtcacaaagttacgcctaagtctagtaaaggcggtgatgcagaactcgggaagaatttggatgtagagactccaaccgtctagtatggagagttatatgataaacaaactgactgatgctgtacgagttcttgaactatctgatgagttgaacatagatttccccaaggtaaagagtaattataaccgaattgttaaatctgtccacccagacaagaattgtgggcaggacaggggccttgattctgttttggaagcatataagcttctcgattattattttaatgtagttttaaatggtaaaatttgccaattgtgtcatttgtctaatatttgtgaaagttctacttactatgatttccgccatgtcaattcacatcaatcatgtcggtactataaatcagaaaattcagtagaagaccttaattgtaaattatacgagtcgaaactgttattagaggattcgtcaaaattgggttcgaatcctacaaatagatttagttgctgttatatcaatagtaaggaaaacctaacttcttccagattttatattgaactttccaaaaactctcttgatgtttttgagggtattccatacgtcacatgtcgttgtggtcagattttacttattacaactgaggccactgcccttggcatccacacatttgactgtgacatatgctcttgttcatataacatagcataatgtaactataggttcataatctcttagagtaccatacattttatctactatctagctcaatccccaacaccaaaaaataaaattacatgttagataaataaatgccaaaataaacaaatgtacacatgcatttaattttgattatcagttttattttttagccgaatcattttaatattttttagaaaatgacaacgatgaaaatatgtcattgttcgcatacacccaaatgctcaacgacagtaattgtacacaaatcacataacgagccggtttatcaggaattacaaagaataaaagtaattagcaaagaaaaagaatattcaacatgtcaatgtcaaaattcaacacaagaatatataatctacaaatggccaaacagtacgactaatatatttatttgaagcaaatgaaaattttaacattaatataagtttaaatttatttacgtatttatttgtttgtttgcaatgtgtggcgtatgagattaatgaaaattaaatttgtataattgtaaaatatcattatttattattttttctcctagaattaagcataaaaattttaattttattgacacattttttactttttatttttttccctggtttttgtttaattgttattcatatttataaaaatacatttatccttcaatgtgtaatgtaaaattaaacaatattgatagaacaaatgtctataatgaactgaaccatttggatcttgttttgttctccatttaatgggtttaatttggaaatcaactgtattatagattagtttattgttaatttttcaattcattcaatatagtttatagtttacactcaatttggaaaatgttttatattttattgaaatcaaaattttcgtgttgatataaaccaaactaaagtattatatttcgtacacattataacatggaaatacctaactccagagaattacaccatgttgaaggtgaaccaggtaaaatatagatagagctttatttaaatgtgtatataaatttttataaacagtaatttgttcttatatatattatttaataattcaatggtataggtaactttgtcgtaaggaatgatgaccattttaagaacgaagcaacggtctcattcggacaagaatggtcaaagtctaaactaacaaatgtggtagacgttgtaaattattacaaaccgaacccaaaaagtcatgtttacctgcctgagaatacatttgacaccaacgggaagatcagagggcatatgggaggagaaaccacatttcgtagagatccacaatcaaatcggcaagaccacttgaacactcatacgaatgataacaatatctaccaccagtttaatgaagtagaatctgtagactcggacaaagatacagtggttccagaagcaagggttaaaggcctgtttgaagtaccctttgacgtctattcaatgcccagactaattgctccatttaaagggttctccaaaataataacgccaagagcaataagattaattaactttacagaaactgaagaaggcaaattaatgtgtaaaatagataaaaacgccatgaatatattacaaaaacaagtcggagatttaaacgtagtctcagttagcttcgtaggagatccaaaatcaggcaaaagctttttagcaagccttttggtgggaaaagataacacaagttttaacatatcagaatcatacatagacccaaataacatgcttgtcgatggatcagtgtgggtctacatatcagtttatcaagaaaagcacgcttacgtgtttttggactttgaaggatttgaacactcagaaaaaaacagaactaaaatgttactgtttgcattttcactctcaaacttggtattttgtaatgtaaaatattcattgatgaatggaatccataattcaataacggcaatgatccaactaaccaaaaaaccaacttcaaacgagaccttgggagaccatgataattcacaagaagagaatgagtttttggaaataatcaaaggtcaaggaacccgtcttctgagccgttcatacgatagccagaattttgttgatttggttccgaactttgaagattctgaaaattttcaaagtgaaagaaaggaactttggagtgcaccaatagtccaatttgttttcagggactcctcagggtttgtcaaatgtatagacgatcgcatttttacaccagaaaccttggtggaacaaggaatttttgagaattatttagaccttttcaccactgaagaaagagatcctaattttaggaacgaaatgctagactcatttgaagtatttactaaccggaagtatatctcactgccacatccaacgctttcgacccacccgtacggcgataacgattattcaaaagatgaagattcaaacctagctgatttcttcatgaagcttctctcctcggacaaaaacgactttaaaaggttcacaaggttaagttacgacgatttaactcttacatctaatctcagcagcctgttccacgaaaaactcgaccaactcaagtcgcttctgtatcacgatacgctcaactacgccatggcacgccctcaagttaacgggagaatgttcggagagtaccttaaaaaaatggccacccattttaacaaggacaactctctaacggttgatagattaaacgatatgctttcatccgtgtttttaaacgagaataatgtgatcctaaaggaggcattggtcaaattcttaaaggaaatccgagcaaaagtagctcccaagctaccaatggacagcaaagcactactaaatttggccctgtcatcaaaattcacaagcttaaactacttcgaatcaaatgctttcggaacacgacaagaatatgaaatgaagttgaatgaactgtcagaaacacttgaggacctaattagaaaattagaaaataagaataagacactgatgatggagcaacttgcaagctacgtcgatagaaaggagcacatcataaggagtaatctcttaaagagagaatacaccttaaatgacctaaatgaagacttaactaaacttaaaaaatcattaaataacaaattttcagattccgagctcgtttcaaaggtcctcgccagagcctcaagtaacctagtttctctttttaacgacactcatccagaaactttcgtccacaatctcagttattccaaatcctcaagtatagaagaaacattccagaaccttaatacctacatatcaaacatttcatcacatttgcaagcagaaaccaatcctaagagcccaccaggttactctggggctgccgaaagtgtaatgaacacctacaggggaaatcagaataataagttagatagcgacctcggagataatactttagatggagattattacgattcggatgatgatgacgaatatgaatacgaggattatactgatgacgatgaaaacgatgattcggaagatgaagtggaagtttcatcagatgatgagtatgaattagaagtagaggaactagaggaaacggaaacttcagaagatgaatcagaaagtactaataatgtagattatttagaagaggacgatgaaagtgatgttgtagtggaggccgaggtactagaagatgaagtagaatctctatcactcgaggacgaagaggagtctgaagaagacgattctcaggtacaagataataatgaaaataaatctgatgataccagtgtatatgaacacacaccagatgaaaatgttgatgaaccagacgaagaagactcagaatcacaagaagataaccaagttgtgtgtaatactgattccaatcaggattatcagctattaggtgaatgcgggggtacacaaagttttatagatgatcccggagaaatgacgtcccaaaactttgatgatgtttacgtagataacgaaaaaatggagaacgatcaggacgaggtggtagaaatccttgaagacgatttcgcacaagaagatattgaagtaaatgataaaaaggcagttttgcaagaaatatttgaaaaatcagccgacgatttcatggaatcgagagccgctaaaaacgttccaccgtaaatacaatattttaacatatatacatacatgtatatataatgtattaaactgaatttataacactatcacaaatagatttataaatacaaaacgatttttttaaaaaaatcagacaaaattaaacagatccatgtttggaactccattccaagaaaaattccataccttcatcagttgaaggccgggtgcactccaaagctctttcgatgtccttcatctcaacacccctaaaatcattgaaactttttatgttctcaattccaccatacagctcaatggtgtcgtcgtaacaatactcggcagccttgtaacacaaggttaaaaggtcacagccagtccaaccgtcagttgcaacagaaatcttttccaagtcctcttcagtgagaaagcatttcttgctagaccgtttatttattatatcgataataaacttctttctggtctcatggtctggtggagggatcaatattcgcttagtaaatcttctgagagcagcggagtccatcatatgaggcctattggttgctccaatgactataacaaccctctcttctcctgactccctgtcaatcgataaactaccagaatttatcccatccatcatctgaagaagttgatttttcattctaacgctagaatcatcgtctgttgatttcctcttacccaagacagcatcaacctcgtctatgaatatcaacgagggtgactccaccaaagcaaccttaaatagtgtttttattatagattcagattcaccgtaaaatttgctagttatggaacttggagaaatctcaaaaaatgtggcgttagaaacatttgcaatccattttgcgatggtggtctttccagtaccaggagggccaaataataaaatacctttgggtgccttaaacaaaccaatgtgaaggttaggcattaaaattggattaactactttatcaatgaccacctttttaacatcatccagtccaacgatatcatcttttgttattttttgacattccaacactttcatgtccaaggccatgctaatcatttcaggagtcacatctccagttacaagggacaaatattttgggtccaaataaggcccatcgcccttattgttaaccccctgacgagctttataactgttgtaattgcccaaattgtaatttggatgagaattttggtttgggtattgacctcctagctgatttttggcaagatttttataatctgagatattagatttggtaaggtctatatcgtccaaaggttttgtattaccttccttaatttggctactaagatattcaaggcctgacttgaatccgacgttcagttcaaccttgtccttggcttcaagtttgttaaagctcttaggtttgacgtaaggaacatgattagtagtgttgatattagttttttcacttgtggaagtaacattttgtacttttgggtgagcatcgttcaatttatgagaatcatccacggaattaggcaacttagtttcatcaagtgtaggtggatctttcggtatagattttgccaaaacaggtgcgggttcagaatttttgggacgttctgatgtagtatttgcgatttttactctttcgaagggaatttcgttaatagagtttatcaaaaaccttcttgctacattggtaagtggaatgttggagatgcaggaatctccttcaaagaaattatccatgtataatcttcttttaatttttgattctggctccttttcatcatgtaaccttgaattgtcgtatatactcacataaggggcaaaattgaaaatggtatcattaatatttgtaaacacatcaaagttttctttcaagcaatctttaaaatcttcagaaatttcaacattaaaacggtacaatgcttccaaagtttcatctgtacacattttttcttcagtgtgatacatgttattgagcatttccgcaatttttaaggtggattctgctggtaattcgcgctcataggcaagcgttaacgcctaaaaataattttttacatttaaaattgtaataatgtcttacttttagataaaaatcatcgtccgtccttcccatcattcaaaaagaagaaaataaaagaacactttagtggaaaacatttaattttgggttaaatgaaataaacgcagaagaaaataatgaataaatattctgttggaaggaatatgtgtgtagacttttcttagtcaggttatctgtaagaatcctaatataatgataacgtctaaaagtgtagaaatcaaataggatataaaataataatttcaatcaatataaataggatttaatattgaatgcagaataattatagtagaatcaattacacattaatctgaaaggatgagatcactaaaagtaatgggtgtaatttcataaaataatttaaatgctttaaaaattataattttaaagctattttagtattaaaatttaatattttgtctttatagtagtaatagatcaacacatttatatggacctcataaatagttgagttattgaattaatcgaactctaaacctcttcaatatttattactttaaaatgtataggcatgtaaataaaaaatatcaacgatcttgaataaattttaacaacatgtacttgtgccacgtgaaaccacacattccaaaatattattcaaatatttaatttatatttttagatcaccattaatttcaatcactttttaattaaatcgttttatattatagtagaatagcttttttatcaacaaaaatactaaaattgtagaatatgtacatttggtcataattttcactgatccggaatatattatttttatttaaaattaaatgacaatgtttgaatatactagacaagtcgcaagcgggaaggataattacgagaggatagcaaaggaagctggagataaggttaatggaagcgttctgactctcttagtgaaagcaatattaggtggatggttcgtagcaattggtggttacgctgcatccgttatcgcttcattgttttttgatccaggagcctcaaatggaacgtctagagcagcttttagtttaattttccctagtgctttatgtgcaattttgttcactggaactgacctctacacaggaaatactatgagttttacatttgcattgtacaaaaaacatataactgttttaaattacttctataaattgggtgtttcaattctggggaactatataggcacagttcttggagcaatgatccttgctggaggaaccacttacttcattattgatgtgggaagtggagctccttatatgacggatttggcccttgctaagacaacaaaacccttttggaaaattatgttctcggctataggatgtaactgttttgtttgtttggcagtatggtcattttatgcttgctatgattcagcaggggcagtgttaattatattcgctcatattggagctttcgcagcaggagggctagaacatatcattgccaacttctacctattaaacgcagctttgatttcaaaatcaggtgtatcatttttggatgtttattatcgtaacctaattccggtactcctgggtaatacaattgcaggaacatgcatcatgggattgccactagcatttatatacagagataataaaaatcaatctattttcaaagatacaagaaacgacgaagttgaaattaagactctcgtgatataatccataactgagtaatgattaataaatcttcttactccgtattatattgttatacatattattgatgatttgtctatgattaagaaatatttctaatatttttagttactttccaagttcatccacactggttaagtatgttgtaaaatatctgataacattttaaaatgaaagtaaatatataaatcataaatggctgttaactagtttatgatcaatatcgagattgtgttcaaaaaaatgtgtatatttggattaaataactatttttaaaatttatacctattattttttgaaaaacacatattaaaactttcatttagatattaacattggtgatttaaaaaatagaacttatattaaagaaaaaacaaattatatagttattgaatactgaacaaatatctacaacctatcttcctaggaattccacaaatttataagtcgaaaaaaaattttttattaaaaaacaagtaaatacaaaaatgtgttaggttatttatgttaaaatgatataaatcatgaccttttaattgtgtttatgaggataacataaaagttaatactcaacatgataaaatgttttaatgggttaatttcaaaaatatgctagtaaatggtttatacaaattttattttagccatttttgttaattattctccttttaggaagtaatagttgaaattattacaaatgatagattttaataaaaaattggattaaaaaacaacgtattctataaaataattaaaatgggcaaaaaaagctcgaggtcagaagaaaaaaaggtcagagccgctgacttttctaacttccatacctcagatttcaggccgacagggttgcaccaaatatttgcctcattcaacaacatcgcatctttacaatccaatgtatcagtaaaatcagagtcttctactaattcaaagcaaagtaactcccaaagttacccatctaaggatgtgtcagaatcacaagcagatatactagcaattctcaataaacttacaaagaaagatagtataacaaaacttaaagcactagaaacatttaatgaaatacttgaaatcataccggatgagttgttggaagagtttatagttgatttgatacacatattcaagaaactggcagtggttgaaccagttaaaaaaataagattagagtttggattagtactttgtaagatctctaagaaattgaagaagaagcttcaaaattatctcgaaagttttatcacatattggtggttatctatgcatgacgagtctccagatatttcacaagtttatttggaatcctttaaaaatcttttctcaacaacgctttccgaaagtgaattcgaactgaaaacgcttaaaattttagatttttattttacaagaatatcttcagattacctggagttgcttaatggagatatggatagttatacaaaagagtggttagatacctttggaaaggcaagccaaaacagtgccacaacagcggatatgcataacaggttattttattcaatttcacactcgcttaaaaaattatttgtatacgtcagggttcataaaaatgactacacatttgttctggatgatttaataaatagtgaatttgtcgaaagagttaatgaagtttacaaatcaccgtcatttaagaaaaagctcgcctgcctattaatgctagttgagatggttaaagtcttgccaaagcaaacccacaaccacttggaatcaattctgtcaaactgcataacgtgtgtgagtaaggataccgaaccttcactgatataccatagtgttagattgatatgtgcctgcaccagagagaataatagttgcataacatggtttctaccaaactatgacagcctggtaattttgctcttgaaaaacttcagtggcggatactcaaataaaatcgatttatacactttgttcccatcactatacatgtatctcgatcctgagtattttaaaaactttccggaaaattttgacaatgttttaaattacttgtgtgacctgatgcagaaagaagtgtccaacctgaagagaaactcatacacattcgacttggagatttatagaaatctgggcacaagcatgttatgctctttttataaactcctcttgctctcaaaactaaaatcaattcattacattacactcccttttaaaaaaatgtcaccaaccactgaaaactcaagagattttttatggtactatcacatagtacttgcagagtacctattggagtccaacttggccaaagaagacgttttcacggattttttgaaagagctgttttcatattctgaagataacactgttttggttacgctgataatggataatgtttatactaagctgggagagacaatagaccaggtatatccagaatttcaccaggtatatagtaatttattggagaaggtgaaaacaaagttccttgactacttgatcaggcatttagaaaatcaggcagaccttagtctggatatagatcaaatgatacaattacttaagaaaaatccaataaagttgtcaaatgaaataccattgatcatatttaagattgattcacacggtgattttgttgaaaaatatgactttttacaagaagtttataaaaaactggaattgaatgatttggccgagagactagaagaaaaccttgacgacaatttacatctattctatgcggcagtacttatggaaactaatccaaaatcagtctcacaggtgtttgatagaaaatttgatctacaagatacaagaacatattatatgttgactgaagcagtaagtctatgtaatagcacagaaggttcagattatttggttcaactagcaagagaacacccgaaccttgacctcttggatagtatttttcaacgtgtggatcacacacttttgactggtgaaaataaaactgtttatgagatactcttggtattatatcagctgtatgaatgtaaaaaggtggaattttaccggaagtatgacctgaacctagttgaaagtattatgacactttacttaaatgtagttttgagaaaacagatgtatgattttggtgtgtttgcgtcttttgttctggaagaattttcaaaaaatgcagattttaaagctaagatggaagaatcacaaatcaaaaggctcaacgaacttactgctgtggacttgccagattatgaaaagttttcaaagaatttggggtcaattttaggaaatctgtttcaacctgactttgtaagtaatgtgcttgtgaagtctatgggatttgttagaggagttgatataaaaacattgcaaaagaggtcttataacatagtggtaaacttgtacctggattctgacgatccagaagttaaagttgaggagtttttggatttatttataggaacatttgttagttttgagcctgatacgtgggttactgtacttggtgacttcataaatatatcaactaaatatgagtttaaaaatgaggagatgctgatgagattcatgaacaaaatgctagataagataatggaagaaaaatacacaactcttagagagttgaatagaagtgtaggattattccaattcttttataaaacactgagaaatgatttaaagaggaataatgatttagccagtttcatcaagtcatgcttctctatgaatctgaccgcaccttacctcttatccgcattttattcagtcgatactatatcagatcaagatactgtgcgtgaaataattgaatttgggaagttcgtgctaaataaaagaaaaggcgagttaaataaattggaaaagcctgatacctacacatttttgaactatacaacattggtcacatgtttgctcacaaattataagaatttaaataaaattgggcatttagaatcggaagacgtttttaaactgttcaatctctcctttaaagctttaaatatcgtagattcatctccccataatcacatcgacgatagaacaccaaattcagaaactatccaagaatttttaaattcaaatcaattcgaacaaaacaaatttttttcaagcctattcacgttatttttttccgcggatttagaagaaacggatttcctgtgggcccatctgtcactattcaagtttctatcactcttctcaccagatatacacaagaattacaaagatgatattcgtactggcattactagttctcttgcaaacctatatggtagtctcacttttcacggtgtttcgacgagtctcattgccactcttatcaacttccaaatagaacaagcttatgtgtcagaatttcatttgagagtctcccctgaagtagaacattttttaaagtatgctaataaaccggattttgatttatctagggagttcaataaactcaaaatctcaaatcacacagaccctaaatccttggcaacttggttggttctgtgccttaagtatggactggagtctgtgaaactagatgattccgattcaatagcagatttctccagaagtgtttcactgcttctgaggagcacgcactccttgcaaccgagttcatttttcgtaaacgtttatgcagcaagtctgtggaactgtagggtcttttatccctcaatctcagaagtgggagtattctgcagtttcccgaaccaccagcacgtgtgtatcatagataacttcccagaatgggatttcttccacgatttaaactcgtgtaaaatcgattttttcaagttgttgtacgcatttaacaattattcacagaatacagtggagttggaagagaatgaattggatccagaggaacttacaattaatgatttgaatgatgaggcggactcagaagtagcggatttgcaaggaaataaagaatctgtaaatgaaatggatgattcagcaaatcagaataacgatgaagttaaggaaccagaacataatattatagatgtgaaaaactcatatgatataatgaagttatacttttccatgataataggaccgtacctgacaagtaaaataatgagaacatatacatatttggaaggagaagactcgcaggagattgaaaaatgcctaatatgttggcttacagtgtttaacctacacggaagatataagaatttgggtaaccttaattgtgcaaacgcaatggtgaaactgcttacattaaaaccgtatgaatttacagaatacatagattcattccaagataacttagctgaagcaatttgtgattcctactatgagatcaacaatatgtcttttttctattcagaccagttcaagctctatgaattgtacgaagacgaattttatacacgagaattctataaaagtagtttattggaccttttcctacaactactgatactgtgtcttgagaaaatgctgataaaggacgaggagttctgtcaaacagtaaagttggtatattacaaagtggcaaaaatattcccaatgcaagtgtctgaaatgtggaataactgcaaaaacacatacgtgaagaagaatataaagaaattcacaaaacatgaagttacacaaaaactggttaaagatgagcttgatactatcaagatgctagcaagtgatcttacagtgttctacgatacaattaaaagggaagtcacagcaaaattgctcacgaaaaatgaaatcacggcaaagataacaataaaggtgccatcagcattcccattggaacccctaacctttgtttcacaggagaaaaagaatcataagtggataatgtactcacactcagaagcaaacagaagtggaataacacaaggactgcttctgtggtataacaacgtgattaaatactatcaaggaatagacgaatgcccaatctgttactcaatagtacacgcacagttccagtcaataccgacaaaatcatgtaaagtatgtaaatacaagttccataaagagtgtttgttcaagtaagatttaaataaatagttatctaaaatataacttaaaagtaacaattttttagatggttcagaaatgcagccaaggccaagtgcccattgtgccagtcgcaagtctcgttcttgtgaaaatagtcgcaaataataattttaaaataaaataattttaactattgcatatttacgcgcatacgtatatcgcccgagatcacatttgatccataactaatgatggggagcgttcagtatataaaaatggataactttactaaatttcatacaagaaggccatacttcaacgttaacacaattctagactttgctcctttaacggagccccaaaaggtccacttaacaaaggtttacacgacactggccttttcagctctcgtaacttttctgtctgtcgtgataaacggaccatggaccatacttcacccgttatttggagtattcttagtcttgggaagcatattctacatcatcttcacgaaaacaagcagaaatgtaaggtgcaatcttgaaaataaatttttttaggattctaattataaaaggctcgtcgcactgttccttttctctctaggactaggaatcacttatagaaactacatactccaggctttcgtcttcaaaccaggtaaatatcatccacgattaccgtttttagaaatcgtcacgaccgcactcatgggatcaattggaatttttggttcattctctctggcatcactcttcatgaaaactaggatggcaatgtacttaggagcactgattttctcactctccaactacatcgtgatggtcaactttgcgaactacttcttcagatcaagattcgttaacaacgttacgctcatcctaggactgtttctgttcgtagggtaagtaaaaatcatcgtaatagttatatactaaataaacatgattaatgaattaataggtacattgcctttgatacacaaatggtactaagggaagtgaagaatggaaacgaagactacatataccatgcaatgatgctttactatgacctctttgcactcttcctggaactactcatatacttaatggaaaaagaaaaaagtaaatcaaaaaaagagaaaaaatgaacgaaaatacggatcttaacagactggcaactttttacagtttttgaaaccttattatctaatatgtccttaaaggatatagaagatcaagtccattaaccttcattggcatatttaaaggataaattacttctttttaatcaaaaataggtcccaggatgtagggtcagtctgacgggtggtcgaagattgaaaattcagaataaaaataaactaaatattatttctaattcaattttatatttatatatcctaaatagaatattatttaataatatatgataatatagaataataatttattaaaaaatgtaagatagaagttaaaatctgaatttatctggaataacaacataggaagaaactgatcaaaaaacaaagtaaatttattgaaattaataaaaatactatgaaaatatataaaaatttaaaatgtataaatttgttgagatcattttattattggggaatcatacacattaaataaatttattcttttgttgtacaataaaaccgatcacataatgattgaaccctttcttcttaaggatagaaatgaaattttatgaattatcaattacattaacagaaatattacgtccgatacaaatttgtaatcagattccattgagaaaagcaccaaaagctaaaccgaaaccgaaaccgaaacaacaagaaactgttggagtaacaagatattatccatatattccaccaaatctaatagtagatacagtaaactcattaaaagataaagaaagcctatcagagattctagatctcatttttagcccattttcaccggcagatacactagaagatcgcaaattatatcaaaaaacatataatatatatcaattatataagaagaaactcatagaaaagtataaagaaagggaatcatacataaaatcacaaatgttcgatgcaatagaaaatttaccggaaaatttatacgacgaagcagttcaatcagaaacagagccgatcccagaggaattaacattgcaaaaggcatatagagaacaactaatcaataaacacttgtcagattacgaaatagaaaaacttgacgcatttcgaatgttaatgtatctaagatttccacacaccgagactaagctgaagaacccaggactattttggcttgaagaaaagaaaatgatatctagacagaagcaagcatcattgttatcaagaaaatctaaatccaaacaataaacatatgtttgtactactgttatttatatacacgtcaacagcatttatagtaaacaatataaagcatataccaagaattatgagtaacaacatggcaaataagagcatttcagtgggaattgaaaggacgatttctgattacctacctaacgtaaaatcaaaaagagttaacggactagttaaattccttttggaggactttcatgtccatgaaattgatctggaaggtaaaatattgaacctgggccggttttttgagatctcagaaattgaacgagccttcgaaaggaaaaaaagaactgaaacaggacaacaatttctctcatcttataaggaaaatccagtggtaaattatccagaagacttgtttcaggatcaagacaaggtgagatttaatgctttcctaagatcgctgagtaataaattgcattttgacccgaagaataatgagcctgattttgcagtattatgttgcaaaaacggagaagataagcagattagaaaaagagtccatcagtggataagaactgagctgccttttttggattcaaaaacaatagatttgaaggattgtaaagatgatcagaagatgagtgaatacctagaatcctatcctgacctttctaaattacctcaccactacaacccaattatcgttgtccctgccaagctgtgcaaaaggtttttatccaccaaagttaaagaaaattgcttggaaacgggttcagaacctgaaaaccaccttacactcgatgaaatagttaaaagcgtagataaaactgattatgaaaaatataaacctaagtcatatgctagatacttgcattttaacatgcttaaaataaatagagacacctcagaagttataaatatgatatgcaagtcagcgaaaagatcaagctttgatgttttctcagcaggaaacaaggataaaaggggaataacagtacaaaggctgtgcataagaagatgcagaatagtagacctgttcgaagcaatgacaaaaaggtggttcgatgatgtgtatgttagcgatttgttctataaaaattcaaaaatcagcttgggagatttgacaggaaaccatttcaaaatagtcatcagaggtatagaagaccactcaaatatacacaaatgtatggaaagactgaaaaactatggatttataaactattttggacttcaaaggtttggaaccaaaatggtgggaacccatatagttggagcagcactaatacaccaaaaatacgatcttgcaatcagactgatcctaggagatatagaaaaagctaaacagtacaaagtgttcaataaattttacgataacgctgatctagataaattgaataattatgagtccagaccaattaagtctgaaaatgaggagggagaagtggaagacaggaagtttaggtgggcaactgattactatttaataggtaatgatgcggaaatggcactaaagtacttgcctagtcatttgtttgtagaaaagagtttattaaagggcgtcatttctaatataccccccgataagtgcttaggaagagtaccgaaaaacattctcacaatttatgtacattcaacccagagtcttttattcaaccttgcagcaacagaaagacttgagagatttggatataaagttgcagtaggtgatttagttgcaacgggagaacaagaactaagtagttctagcgaaagtgaagatgatgaggttaatctaggcctaaacaagagaacacaagtagttaaagttgaaaatgaagaagaggcgagaagatatacaattgatcaagtggttctaccgctcccaggagataatgtaaagtatccagaaaacatggaggatttttatcgcaaaatttccatggaaaatttcaatattccactagaagacttctcttcatttaaagatattgagggtaaaaagcacagaagcctggtttcagtgagaggatcatatagattcctcatagtaaagcccagggatgtttcatatgaagtaatagagaagcttgaagatcctttccaggttctaataaagccagaaatagaaggatataaacaatgtttagagaaatatgaaactcagaagaatttgggaaatatttatagattaggagatctaataaagaacagatctgcgctcctcttaagatgttctctcccgaaatcctcttatatcacggtagctttaagggaaatcataacagatcagtcaatagaaagtaatcaaatttaaaggtgacgttttcattacattatttaaataatttgttctaatggattctttctgttcccacactaacatcccctatatccagctggatatcattctaaaatagacttcaattttcattaattttgttcaattatatgtttctaatttatctaaatatatttaactgttcaaatattaatttatcgcatccaaacttgattttcataacgataaaacacatgtaaagtaattaagatgcaaaaacataacataacatacctaggagtgctacaatgtaaagaagaaccagtattcctaacacaatgcttccatttttcagatttgccgtacttttcaagaggccaagccaaaaatgtgtcgactttcatggcaagagaactgtcaaagagagtagattatggatttacagcaacaacagtggatgattatctagtttactcaaataaatggagttcaggattgtgtattttatgtatttgtaacagagattacccgtctagaacagcatttggactcctgcaacattcgtttttcctatttaatgaaaaatacgtctatgaagaactaaaattcgataatgatttaaatctgagccttccagaactaaaggaattgatgttaaagtacaaaaatccggaagcagtggatatgtatgagaatgtatacgggaaggtgcagaacacaataaacatagtacacaaaacagtaaaggacctgttaaactgcgaagaaaacctggaatcattggtaaaccaaagcaaggacctgtcaacaagaacaaaggacgttttcgctaaaagtaaaaagctaaagaggagaagctgctgttccttaatgtgaaaaaagataccagaaacaccaatcacagagccctctcagccttttagtgaaaatgcaagcacagagcaaaacttacctaattccagcatttcttactttgccaaaaaacaattcaacgcagccagatacaaaaaattattcaaaaactgttatttttacatcaatgacctgagccacagctatagagaatattttgaaacatgcaaaggcaggtgccacgtctcagtggttttattcagaaataggttgatcgatatcatactgaagagaggaggagcaatagaagctggcctgtccccctatgtcacacattttatagtagagaggccgagaaacagtgattcatggtgggtattcagaagaatcaaagggttgccaaagcaatataaatttatcacagccaagtatgttatagagtgtcatttgaagaataagaggttactggagaaaaattacttcccaaaatttctcaagttgccgttaccgttgacaagaatcaggtcaaatgagaccacaccgaaacgagttgaggataaaaagccaaactcgccacaaagctcaaaagtcgagtccttcagattcacagagacctggtcccaactcctagaagctgaaaacctccaagagttcactaacatggatgtcggaatatacatgaatgggaatataatgtatttattctttgagaacttcttgctggatgccatcttgggagaaaactttgaaggcccagcagcaatctacaaccacgggagaatcttatctgttaataacgaatgttttaaccagggggtaaagaggggaatgtatgtggaaaacgcacttgatatatgtaaagatatgaaaccagtcaagtatgactgggataaggtcaatgagagaggattgagaatcattagaatcctgaaaaaatatacagaccgcattctatcccctcaatacaatgagttttacctacagatttcatatccagaatgcagaaatttactggaaaatccttccacaaacacagacgagaacatttgtaacctcgcaatccagatatcaaaagaagtaccaggtgaaccagtaatagggattggaaagaacatgcttgtctcaaaactggcctcaaaaaaatgcagaaacttgaaaatcaattcccaggaatctgattatgattacgaactctcgccaatcgtctgtataacgtcaatttatggtggctgttacatggtttcagataaaatttgtatagtcaccgatgggttcaagttcctaaacaatgtttacctgagtgagattccaggcgtgggttatctcgggcccgttttgaagagtaaaggtttggtgacttgtaacgatgttcgtaagataggcacgcccctgtgcttgcaatcagtattaggaggtaggattggtaagttggtatacaatttttgtttcggatacgattacagatgtgcgaatttgcccaagaaacaacaggacttctttttgaacaaatcattcacgagtgaagtaactattggttcgcatgaatccaacagttctacttccgataactgtacccaaaattcatcaaaacaaggtgatcttggtaaggagtctgaaaaggaacacgacgaatcaaaagtaagttctatagagacaagtcaagaatcaggatgtaataatgaaggaaataatcttaatagagaatctgaagaaagagttctcagaaggttactcagcgaagtgttaaaagacctttgctctgtatactcactcttcgacaagtgtattattaattattccatcaagtacaaatgcaatattacactgcatgtacattctgactcccaatataccaagtctatcacttcaatccttgacaaacaatcactgaggcacacaatcaacagcctatataacaaaattaagaggtaagttaatatttttaatatttatttagtgagtttgggattgagtttcccaagataaaaaagatacagctggaggtactggatgttgttagagttgacgaggatatcaccttcattgataagtttttgaaagaaagaccgtcaacaggtcaggaatctcaaagcccattcagaatgtcatttctctcaccatccagtgctacagctacttctaacgactctgtatactcaccaagtgaaatgtgcaccccaacacgtagactaaacggctggaaactggactccatttctatagattctgggacacctcaaagtccagctaaatcagcaagctccagcgttgcttctagaactcttatcactccaaacattctaagatatgtggacttcaagggacagatttctcaaaaatctaaccctgattccagtgttgactccaagactaggacgcccaccagatcacgcaggtctttaaagctttctaggggacaaaaatacattactgagtacctctctccgtcgaagtttgaattttcttaaaattattgcctattgtaataatgtatttaaatatttcatgtacccaccgagatattcgaattactcttaaacctggataataccgggcataagcaccctaaactaatgtttagaactagggattaattatagaactaggttattcaattttatttttaattaatgtgtaaataaaactttaaaatcaaactgaaattaaaattttaaaattaaaatgtttgaaataatttgaaattaaaattaaatcaagttatttgaaatgaatgtggtttgaaagacgttgattagccaaaaacacgtcaatttcatttactatgtaattctggacgttctcaacgattgtatgagtctcgccttccacataaatcctaagaagaggttcagtcccggaaggacgaagaaaggcacgacaaaacctgaactgtctagtctttgcatcaatcttgtcctggagaatttttggctcgtttaacactgtctcgttggctgaggagctgaacaaagtcttgagttcgggtttaagattatactggaagtgtgaggacgggaaatctgtgtaaaagttcagacagtcatgaaaactgagtttgagaactctgaaagcaagctccaggaacatagaattcaaaatagcgtcaccacttgggaaaaaaatctcgagaaagtcaaacaggagcgtgtcggacaactcatccttaaaatcactcagagatgaaatggtagagtttgtcatggatgtatccagggatgatatttccagatcatgaagtgatgagggggaatgagaattggtgctctggccagctagactttgaaaacagtctttggaataaaaattcctgttatatacaatgtttccatgaccgttggtctcataataaagtgaaatatcgtatttttcggcaagtttctcagcgttttttaaaccactgttgaaatactcatgttgccatgagatgttcttgttttcggaggtatatcgatcaatcagggcatcgatgtaattaacggaggcgccattggaatatcttgtttggaatattccaatggtgagtttcttcttgtagttgactagaaaagtccataaaagcatcaaagtcacgatcaggagccggtctccgtcgagttgctgcacagtgtattcaccgcttgaattcattagggggtcacatggcatgtagtaaagaactctatctgcatcaccatcgaagcaacagaagcgtttgttcaggtaaacattaatgcttttctttagtgcttctgggaaacatgaagttgagtacacgtatgaggctccgcacttatagtttaaatcacggtcttttccaaacttgtgaaagttgcatacggcagggatgattccaagttttctgaatatctcgaaaaaccttactatcttatacccaccaactccgtatgaacaatcaaaatacagttcttctggtttgtcgaggttgtgggaaaggtctaccaagcctaaatcctgtaacgtatcaaaaatcttgttaaatgaattcgacaaaaaggatatgtacatttcatcatcttggacgcatgttgtaccagaagacaggaggtaggaaatcgtaggcgatgttattttaccaataaaattaacgtttgaattggtaagattaagaagattgtagatcgccttaatccccagcgttaaatttgatactagtgaagaacacgatggccttgtgtcacatccaatcaatatgttgagatttaaattttttggtttatatccaaaactggtaaacacctcatataaagcggattggatggaattccttgtatttacaaatgatgtaaatattggttcccagacgcattccaaagtccgtcctgatggtgaaaaaagtttaattccattgtcagaacatggattatggcttgctgtcacgacaattccaagtcccaatgacccattgaaactcagtgatctggagtacttttcaaaatatgcttcagagatgaagggaagtgaggcaaataggagtccacatctgtaggctacatgttccaaatttcctggtggattttctgtgcttcctctgaagccggctgttccgtaaattacatctacatacccttctggaatatctgggccatttggaatcttggagaagtccaacatatcccaaaattcttaatatattaaaaaattaattataaaagtagattccatctatagccaggatattcgcagagttaaagttgatgatataacatgtttaatgataacggtatatcatttgatcatttttataaatgtaaatcatgtggagttataaaatcgaaggataaagtttaatgaaaccatttgagagcatgaggactctcaaatgtgagaatatattctaaacaatggtgagaaaatttagatattggggtatcatgaaaagtgtgatattaaatggatttatatttaaaaacattttttgtattaaaatatcattgttaaaaaacgaaattggctgtattgacctaatttgtcactactattataaatatatcattaatgtatattaaacaagtgattctgtaaaggatattcaagtctattaattcagcgattataaattaaacaccaaactcattattaataagacttattttttatcattaaattaatagatgttatatttctaaagttagaaccaaacccattaggagtataattgtaatgacataaaattcataaagaatattctgtgtttttaatacataaatagaatcaatcatttggtaaaactaataaatataaaagtaaaaaatctaaccgtaaagattaaaaatgatatatgtatatatacatattcgaataaaaaataataattagtatcaaatagaagttaataatttaaatttatatttaaatgttataatagtttgtaatatggatatataaaagtgacaggaaaatgttaatagaccaaaaccacataataagtaagcacatcccacaatcaacaataaataataatttgaagtgcaaaagaatatcaataaaatttgtctgaacaaatacttaaataattaaactctcaactacacaaattattaaccccagatataataccaatttaatgttgtttctcaaaaccactacccacatagttcattgattactgaaataggtcaagatgggtttacgcaacttattcactaagcctttgcattttgaatatgctcttctagtttattcgttgttgaaagttttgaggctctatgcactatgtagacagttatgtttggttaaaaaggaactggctggagagaagaaagttgtcactactttggctaaaaaggatgatgaaaattataaaagaacacttgctctcctcaaaccttacctaacatcagccgcttaccacaaaacgttggaatactcgaaggacaaattaaaacatgctatgctcttcgagttattgcattggcctgtaatgttcgcatttttgtttaacaacaatgtcttgaaatattggcatttagcaggaaaactattagatcataaatgtcaatattcacaagttcgtttttatacctaacacatttattacttattccatttttcactagtgtacttatatttttcttatattaattatgtttttaggttcttgtctactttgcttttagactaggatttacattcgtttttcgtctcccgttccgttactattctgcgtacaggttggaaaaaaggcatgggtttaaaactaaaacccgatttgttttctttaaacaatatttcctatgttatgccttttatgttctagctctaactggattggcttctggactaacctggctccagaagctttccaaatcaaacttcagagtaaatgtaagttatagtttaattaatggtctttcagggtttcgcattcttggttgttttcaaaactgtcttagtgtttgcagttccattgttactaaggctgaaacacaaattgagtccattagctgatcctgagctaaggagggaagtcgatacaatggtaatactattctcaatactttatattatatctttatttaactcttataaatttttagggtaaaaaactgggattgtcatcaaagaatgttcatgttgtatcacataatacggcacataccgatggtgtcagtttatcatggggattttgcaagtttaagcatgcttatctcaatgaatcttatgttaccctcggaaaaccatctgttatggcattggttgcccacacctttggccacttcaaacatcaccatttccttaaatcatttctttttgatctaacaaaggttacattcttcctatttttgtatgatcacttcaaaggtgattcagcattattcaagagctttagtacttattctgtatcagctctgacactcaggctcgataccttctacatggcagtcttagctccattgaattatctatttcttgtactgagatcagtttattcacatttccttgaatttgaggctgatcgatatgctgttagattgggacatagtgatgagctggttaatttttggactaccgtttatagggaaaagaagtggtttttcaatgtagatccactttatggtcccttatttagtgaaaggccatcactttttgagagggtttatgctgtttacgattctactgtagctccaaagcctgttggtaattaaattttgttcctatatatatttggattgaggggatatttgattaaaaggatatttggattatgaacttaaaaggttttaaattcgtcccctgttacctaactaatttaaatttaattataaaacatgattttccaagaatcacgccttgaacaaaatttaacacagagtttccaaacaatattaatcctttaatattattaatttttcacatttgttatctagattgtgtcttacaatattaataagttgatatattttgaattcaatatctaggattccccagaaaccattagattcatcgttattttaacatttcccaaagaatcctctgtaccagtaaaatcaccattattaattagtttatcatttgtataatgtgctaaaaatcatccatttgtatttgtgaattttgtcaaaatgtacagaaaccaatatgacactgattgtattacttggtctccacaaggtcgtttattccaggtggaatatgctatggaatctgttaaacagggtacttgctgtgtaggcataaaatctaatacacatttggtgggttattgaatatattatttgtgtcatctaataatccatatggttataattttacaattccctatttatccaatttcactaacgataactagctaatgataactaactgatgattaggttttgtgtgctctaaaacgtaagatatctaaactggctcaggttcaggataagctttataaggttggtgaatacattggtgttgctatgtctggtataacttctgatgctaagatgattatttcctacatgagaaacgagtgtttgagtaacagatttttgtacggatgtgacatcactgcttctcaactcgtatcgctagtttccgaaagtatctttcatacagctcatactacttaagttgtatgtagtcatatattacatattttacaattgattcatctgattatttttctgattatttaactttagaatcgcaggccaatactcaggtatcttctaaaagaccttttggagttggtcttttggttgctggctatgatgagactactggtttacacttgtttgaaacatgtccttctggaaatgtggtcgagttcaatgtatcaatagttatattcccattgtataatactgacacaaatgtacctatattacttaattcattaggctactgcttttggtgctagatgtcaatctgccaaaacatatctggagaggaagatcgttaacttctcagaatctgacttgaatggacttatttatcatgctattaaggctttgaagactactatacctaatgatggagagtatctcaataactacacatactaaacctccactattgatcatctgctatttatcatcaacaatactgcctctacaattatcctatgtttctattaattttgttacagatttgatgtcgatgtcatctcagtaggtgtagttggtaagggaactccatggaaggtcttagattctgactttgttcaaacatttgttgataaggtattacctgactcactcactggctgtagattaaacaagaagatggtgtaaatgataatgatgtaaaagatgttacaatgcaataataattttattaaataaatctaaatattataataatcttattaatgtgtttatcacagatcttttattattgggtatatttttttatttattatttttttacataatgggtgttactaacttatttcatcgtcctttacattttgagttttttgtatctgttgttttattacacgagttgttcgagcaatacttaaattttcgacaatatcgctttgtaaaaaagaagttaacgggagataaaacattcttgcaagaaaataaaaatgatagaatatataaaaaaacattggaatcagttagtgaatatttaaattcagatgattataagaaaactgtcgaatactcatatgataaattgaaattcaacgttttcaactcattgttccatttcttattcgatctgttccttttatttgttctgttttcgccaaaattatggaaattttcaggaaaagtacttaaaaaaaacaatgaatatacccaagtaatttttattcaaacattttgattttaccagttactcagtatattttaactgtaaaaatgtttagtcactggtattttgtggaattaaaatgctattcgatactatggttgaactcccatttggattatactctgattttgtcctggaagaaaagcatggattcaacaaaaaaacatataaactgtttgtgaaggatttgctattaacacttttgctccaatgtgtaataggaggcccagttctttgtgcactaatattcctggttaattggggaggagagcttttctacttctacgtacgttatatatatatattatttttgaaaactaatctgtggactttaggtattcggatttatcgttgttttcaactttatcatgttgattgtatacccagaattaattgcgcctcttttcaataagttcgaaccgctccacgacgaagaattgagaaatgatattgaaaatcttgtattttactatacttttaaccatttttaggcacgtaaagttgatttcccacttaaggaaataaaacagatggatggttctaagagatcatcccattcaaacgcatatttatatgggttgtggaagtttaaaaaggtggtaatctacgatactctcctcaagcaagatagaaaagaaatagtcagcgtggtttcccacgaattaggacactggaagcacaaacatgttcccaagatgctaacattttcattcgcgaatttgttcgcaatgttcttccttttcaaaaagttcaaggataacaaaaacatgtacaatagcttcggattccacggagtcaagtcttttgtaataggtattttatacataactacttaattttctcatatacaaaaattaatattaactcaggaatatcactattttcaaatatcttcaccgttttgggaatattgacgaatctggttaatgttacactgacaagattccacgaatttcaagccgataagtatgcagtcaaactgggatatggtgaggatctaaccaaatcactgttatctttgcataaagataacaaagccatgatttattacgatcctttatactcatggtaccacttcgaccatccagtactctttgaacggttgtactcactctatcagactatggctgaaagaaagctttaatacataattttataaaatatcttacatatagaaggtaacaacacatttcagaaatttgagtaattttcataaaaaaaaatgattagttgtaaaatagtagtataaatataaaaaggaaaaaaatataaaaaataataattagtatcaaatagaagttaataatttaaatttatatttaaatgttataatagtttgtaatatggatatataaaagtgacaggaaaatgttaatagaccaaaaccacataataagtaagcacatcccacaatcaacaataaataataatttgaagtgcaaaagaatatcaataaaatttgtctgaacaaatacttaaataattaaactctcaactacacaaattattaaccccagatataataccaatttaatgttgtttctcaaaaccactacccacatagttcattgattactgaaataggtcaagatgggtttacgcaacttattcactaagcctttgcattttgaatatgctctggggggttttctacttttaaaactgttgaggctctatgcactatgtagacagttacgtttggttaaaaaggaactggccggagagaagaaagttgtcactactttggctaaaaaggatgatgaaaattataaaagaactcttgctctcctcaaaccttacctaacatcagccgcttaccacaaaacgttggaatactccagggataaattgaaacataccatggtgtttgaattatttcatatggttgttggagtgcccttcctatttaacaacactgttttgaaattttggcacttatcagggaaattggttaaacacaaatgccactattcacatgttagtttataaatcttcttaattaacatttcacactagtgcacttatattattctcattttaattatgttttaggttcttgtctactttgctctcagaatggccttgtcattcctgttacggtttccattccgttactattctacgtttttagtagaaaagaggcatggattcaagactaggagccggtgtgttttcttcagacaatatttcctgacttacgtcttttaccttctagtttttactggattggcttctggactaacctgggtccagaagttttccaagtcaaacttcagagtgaatgtaagtaataacaatcataagtattttcagggtttcgcattcttggttgttttcaaaactgccatggcactagtagttccattattcctgtccttagaacacaaattgagtccgctacccgatcctgagcttaggaaagaagtcgatacaatggtaatgctatattattactatacctattgttatttaactaattcagtttatattgatttttagggtaaaaaactgggattgtcatcaaagaatgttcatgttgtatcatcgagtacagctcctgctcatggccttactctatcatggggattttgtatgtttaagcacgcatatctcaatgaatcctacgtcacccttggaaaaccatcagcattggcattggttgctgtaaactttggccacttcaaacatcaccactttttgaaaacattcctcctcgatttggcaaaggatacatttttcctatttttgtttgatcatttcaaaggagatgcagcattattcaagagctttaatactcattctgtttcagcactcaccctgaagctcgataccttctttaatttatttggctcgttatacgtttttttggatgcagttagatcggtttactatcatttccttgaatttgaggctgatcgatatgctgttagattgggtcacagtgatgagctggttaatttttggactaccgtctatagggaaaagaagtggtttttcaatgtagatcccctttatggcaaattatttaactttaatccattctttggagcaaaacatgggggtgctccatcgctctttgagagggtttatgcagtttacgatgctacaggggttccgaaggctgccgccaactaaatttcgatccgatatttatatggattatgaacttaaaaggttttaaattcgtcccctgttacctaactaatttaaatttaattataaaacatgattttccaagaatcacgccttgaacaaaatttaacacagagtttccaaacaatattaatcctttaatattattaatttttcacatttgttatctagattgtgtcttacaatattaataagttgatatattttgaattcaatatctaggattccccagaaaccattagattcatcgttattttaacatttcccaaagaatcctctgtaccagtaaaatcaccattattaattagtttatcatttgtataatgtgctaaaaatcatccatttgtatttgtgaattttgtcaaaatgtacagaaaccaatatgacactgattgtattacttggtctccacaaggtcgtttattccaggtggaatatgctatggaatctgttaaacagggtacttgctgtgtaggcataaaatctaatacacatttggtgggttattgaatatattatttgtgtcatctaataatccatatggttataattttacaattccctatttatccaatttcactaacgataactagctaatgataactaactgatgattaggttttgtgtgctctaaaacgtaagatatctaaactggctcaggttcaggataagctttataaggttggtgaatacattggtgttgctatgtctggtataacttctgatgctaagatgattatttcctacatgagaaacgagtgtttgagtaacagatttttgtacggatgtgacatcactgcttctcaactcgtatcgctagtttccgaaagtatctttcatacagctcatactacttaagttgtatatagtcatatattacatattttacaattgattcatctgattatttttctgataatttgtctgattatttaactttagaatcgcaggccaatactcaggtatcttctaaaagaccttttggagttggtcttttggttgctggctatgatgagactactggtttacacttgtttgaaacatgtccttctggaaatgtggtcgagttcaatgtatcaatagttatattcccattgtataatactgacacaaatgtacctatattacttaattcattaggctactgcttttggtgctagatgtcaatctgccaaaacatatctggagaggaagatcgttaacttctcagaatctgacttgaatggacttatttatcatgctattaaggctttgaagactactatacctaatgatggagagtatctcaataactacacatactaaacctccactattgatcatctgctatttatcatcaacaatactgcctctacaattatcctatgtttctattaattttgttacagatttgatgtcgatgtcatctcagtaggtgtagttggtaagggaactccatggaaggtcttagattctgactttgttcaaacatttgttgataaggtattacctgactcactcactggctgtagattaaacaagaagatggtgtaaatgataatgatgtaaaagatgttacaatgcaataataattttattaaataaatctaaatattataataattttattaatgtgtttaatgtatttttaaatgccttctttaaggaattcattcctaaattctatcaacacatcttccattggtgattttattatttccgtcaagaaaattattggtcatggtatattatatgtgtataatttattttaggtatcgcaacaccctcagatttacgtttcatagctgatcgtaccttacagtgtgttaataaattgaacctatcccaaactacttcacttttgcactctttttcaattgtaatctatcggaattttcaagtattcacatgtttaactggcagaattcggtccctattggattctgagcctccctcaatctatgatacgatcaaaatcattaactcttgcggaagattgcattattctgattctgaactgttcaaaacgcttttaaattttgttaaaacaaacttggataatattaaagcaaaggatgtggtttccattttacactctcttacaaaactcaggtacaatgaccatgaactattgtctgagttatccctggttcccctcaatgatctgactcaaataagcgagggttctttagcaaactttagcatctcaactagtaaaatttatactgttgaaaacacagaaaaatacgaattattgaatgagggcgaaaagatactttcacatttgttgcctgagattaagtctagagcgtcaattagctcttccctagataatttgagacatatactcgctctgtcaaatatgaaacaccttctaaataatcagtagattttaatttagttaaaatctgttttagggaggaattgaatgagtgtatcagtcaactaattaaattcattaatccatcagttttattttatgaacacttggtaatacttctcgagtgtttttctagagttaattatactaatttacacctaattgaaaacatactttcaaatctactaaataaaagaactgaagcaaattcgacacctgaggtatgtaacttaatgtatattcatatttagctcgatttgagaatactcagttacctaaagtcaattacattatcaactaagactcatgaatttttaatgaaacaaattttggataatttgtcaaagattactaaaatacaccctaggctcaccaaccaaacatttagtttaatcaactcgatcaatgtaaacccagacccatttctaaagaatctggagacatttttagaaaagaagataccgagatttgaccaagatacaatttcaaaaataaaagaatcaattcagagatcaaatacaaactggacacaactagaatcaattatagaaagcacctaatctaatacacataaaatgtatataaaatattagtattgcatttcatccctgaattttagataaagtttacgaagacaactgttcttaaacccactgaaaagaggacaagttttcttattgctaaagagagtaaagtaagtgtaggagaagagcagagcaaccaagtcggaagatattccactattataaaacaacaaattttgaacaataaacaagtatggaatatactctgcggggatagaaaagaaatccatgcactcaacgcgttgaccttcatttatcctagaccagaagtagagtacaaagacgtggaagtgaaaagccatgttatcatatgttacaacactttggaaaaggtactttttagaaaaatacgcctccaaaaaagagtaagcagaaagtgtaagcacgccaaaagccaaaaattcaataaacttctcaggcttattgacgtgcgcgagctcaacattggccatgtagttcaagttggaattggaaagcatatagtgacttagccaaagctgaccgtagataaagtaaggagtgaacagcctccaaacttcacccttcaaaactcggtccaaatcaaatttcatccatgataagggtaggttatcattaaaaaaataagaaacgaaggctgagactgttgataaaactacgtaaacggcagttagtggaggtacccttgtcattgaacgtaacacatggttataaataaggtggtcgtacttctgtaaaaaggactttaagttaaaactgtttaaacgcttaactgcagaatctaaaaaatccccaacctccaagcaggaaggtattgtagcgtaagacttggcgcgaactagtccctgaattacacctctcccacttgaattccgaacgcttttactctctccaacacttggtctagtcttaatagtgggtttaacaaggtaacaagtggtcgttttacaactatctaacactgaacaggatgataatgtcaatgctaaaagtacaacaaacagcatcttaacaatcatttcgagtccaccaaaatacgctcagtcaaatcggcagaaagctcattccccgcaaagtcctgggcataaatcttattcaaatgccaaattcctggtattgaacccttaggaaggacatgggtgtgaacaatcttctgacaaccttcggtcttagaccaactgggatataaaataaatgttgctccaaagggatctctcaaagatgctgacagtgatgatattccgctaccagaatcacacaaatcaaatgatatttcaacctacacaccaatttacacattgaatattaatggtatacataactatgtagatagtattagatagtccataataccaatgtttccccgttcggtgagctaggattagtaggtttgcttataactttaatatccttaactctgggtggagaattgtctggattcgggttagaagatttataagagataaatggaccagacttttgaggccactggagaagctgagaattgccagctgaatcgtaagtaataatctgggtcaaaaaataatctccggttctggaagacttgctaattgggatgtttactgcaacaatgaagcagttaaatgagccagaggaaacttgatcaggtgtaagtccctcaaaatcgtccaaacctcccaatttatgtgtgttaaatttaatattgggatcaccaagagaatttctaatatcgggagaatttaatgaacaatattcaagagggaccttccttgatccactccacacatccttcctccataaattattgggagtagattccgaattatcaaatctaaaacataattaattgcctgtatatttttaattttcatacatcgaatacgctccaagtgagtgttggttatttgaacttccgttaatagcagcgtaaccagtattcttcttcctcagttcatagtcatctacaactaaccaaccaactctaatagcctttcgatctaaaaatatttttcaattttaattatttaaaaattatactatataaataaattctgaaacacacctccccttctcaccagagaaagtgatactgaattagttaaagctctgggatcttgaaaatcttctgaaccattgtttatccacactctgagaccaaaatctgcactacctacaaatctttgtagacctttatcatcagtaatcacaatctgatccgttgtccacacacccctctttttcatttgattcattgttatttctgtctctaaaacatgagaacaaccattgttagactttaaaactatatcttcaaatgttccgatttcagaaaatagtctgaacgtgatttttttagcacaagtgtcagattccgttcctctgtggtttcttttattcaacaacttaaaggttaacttgaccttcttcggttcattcaccttaccggttactactacgttaatttcagataaccttcctgggtaataatagtctgcatttcccaaattcaaaaccctaaattcgtgagatgccttgaccaagtaatacacacctcccattatattttcctttataaacttaaacttttgaggggctctagatctaactaatctgggattgagaacataatctgccaaactggaagcaaaatcctctccggggttcttttggtgggaatatgcagaaacaaattcagtttgtttcctagtactccaaccatcaggatctttaggatcctcaaaccaacccccaatttctatccatttctttttcaaatcttctggaactgtgttaaagtgaataaaatgagcaatctcatgtaaaattagttgtgatacatccggataattatggaatccagactccataaattcaatgtatgaggcagaatttggaccagaaggataggctatggcaggagcagttggttgctcaggattaaccattccatcctgcctccttaagaagtatcttagaccattgaccttatgaagaccggagggatattccctccagctagttaaaatctcaataagctcttcaggatgtttaaaccagctttgatagtgagaacttggatagtgagtgaaggcgtttttcgccctaatcatatgctcaagctcaaatggctccaatatgtctacattgtgaacttccttgaatagctttttcatatttttagggttgtgtaggcaaatggctctaattactgacttatacagcctcctggaaaagtaaaacccgttccttttcttatcaatcgcctgcttcgtagagtacttgaaagcctccctagaaatttttacaatttgttcatattcttcgtcttctaccacattgtgattcttgtttggattctcattattgtcaactacattcttaataatctcaacgtcttgagggtataaactttcatcagtcaaaagccacttttgcctcttgagaataggtgtgctttctctgttgagaaaatcaaatttaagaaaaatactcaagagcctgttggcatactcagatccccaaactccatgtagctcaattccaaacataagtttcaattttgctgaagcatcagaagcatcaacatgtgatacaactgttgaagatggagataaaagggaagcttcgtcctgtggtattttgttaatagattccacgccaaattgagaatcgttctgtaatttccacttgtaagtgtagatcgaaccatcgtccttagccacttcaacaactatgggatccttaaaagtgtcgttgacaaagggacaagatttaagtttacacggtaggccaactttcttgaccccgggtagaaaataaccactgccttctgtttttatgtaaaaagtcccctttggaagagaaaaggtaaatttattatcatctttggagacaatcttttcaaataacatgtcaaacctgcttccgtaagtagttcctactattattgttaaaggtttctcttttatcaacccttcaacagttccagttatttctgaagaaaatataacaattacaatacttactgaattttagtgccttctcggaaagcttcactgcgtcgtggtcaacacctacggatgcagttgagtgctgtaagtacgagtatgaattgttcccagactcatcaataattggcctgggaacgaaaaatccacctatttcagcaaatgttggtgctcctattaattccggattgaacatttccaccgctgatactaccccgatgtcattttcaagttctaaaaacactgttattgttatttgtacaaactattatttgaaactcctggattgaatctaagtgagaatgagaatctggagcttaggaaacacaagaaatataatatggatatatttatcagtctggaattaactctcattttaacttaagtgttgaaagtattgcgtttacttatatcaatgtagaatctgtgcgtaatggaatatactattattttataaactaattttgtcactttattataactaatacatatatataaagttgattggtgagttttcaagtggttcaaatgaattatcaattgacaacgtggatcattgattaaatgtgtaatttaaatggaggtaataaagtgaatgtgtaaatatcataagagattttgtaagattagtcataaaaaggtgtgatatatggtcaaattatcaagattctaacaatcaaaactctaaaatatgttaagagcttataaagtgaaatagttggataatagtatgagtaattgagtataaaattaaaaatattattaaattttaaaattttaaaatctttaggaataaattaaaattaatttgaattattaatggtgattatgtatgttgttggaatcaattcataaaatttaattttttatatttataaactttaatataaataatttaattaatttaatgtaatcttattgttttactattttactattcatctaaaatttgaacattcaataaccggaattaaaaacatatctacataaaggtaacgcaatgactaaaagcggtgaattaaatattaaaggaaccagattgtctggaagagtatggaagggatcatcaaagccagttcgatcgattatatcaaagaatgtaaaaaggttatctagggataaaattagagataaatggttgaaaagtaaactttttaaggaagaaatgaatgaaattaaaaaggaggctaaggaattagttgaaaaaagtaaggaagaaaagaagaaaaaagcaaaagaaataaaaattaagcgacagaaaaaaatcgaaaatgaaatcaggtcggcaggaaagaatttaatagtcattggacaaagtaagtgttatttatataattataaaaataattttttagaaaaattctctaaaatgtcaaaaaaagcaagaaaaggcttgaccaaactaacacctgaaatgatcgctattttaaaatcaaataaaagattgtaaccttaaattctcattaaatgataaattgtaatatatttctattcttttatttttagttaaacaattattttattacaggatggggacttgattatgatttagtatatatatattacacctataccatattatcgtattaaacaaattgtatatattagtaaaatgtcaactttatggcgtaagatacacgtaagcttaatttttattattatttttataggtaccaggaagcttaaatgtttatagattcgagaaggtttatagagaaggaccagccacccttgttagaaatttaaataaattgtcagttccagacaaaataaggaactcagttcaaaaagttaccttccttgaggtaatgtataaaataacaaaaaataatattccttatttagtttattatttttatcgatatatcccatatgtaataataataaattaggttgatacctttcaaggagttccagttgatgtaggattaacagaaaacacaccagatccatttttagaaagaaatttggaaaaactgggacaccaagaatgaataaagaatcaaagtcacagaacaaaagtgttctaaaaggggtaaaaaaggtttctaaaaaacataaaaccaaacaaaataagaataaaccagtagaagagaaaacaaatcaaggtaggaatgacaagggtgtacacacaaaatctctaacaaaccatgaggaaaaggtaaaagaaagacctgaaaaggctaaaaagaactctaatgttgtaaaactcaagtttaaaaacttttctggaacgttaaacgacttcaaatcgttgttggattccaacgtcaagagccttggaccctataaaggtgttaatttcaagcagaataaaatcgttgtttcctttgacgacactcaaacactggataaatatctgtccttctataacaaatttacatataatgacgaggttttaagggtctcacttctggattatttttcaacggtgaagtcagattacaaagtgctgaatttgtatggagtaccgagtgattacaatttagagtcagtagaacagggccttaaaagaagaattgacgttgaatttaaacttaaatctgaagatgaccaccataaacttaaattcaaaagtgttccagattgtgtgaaggctaattcaattctaaacaactctagaatccccctagttaaggataagaaggagaccctagttaaagtaacaacatctatggagctgtttggtaaatctacgagaaaaagttcaagagttttcgttcggaacatcccgtttaaaaccaaatacgaagagttgatgagctttttcaaggaatatgataaaggagctaaggtacacattccctcacattcaaaagggtacgcttttgttaatttctcgtccttagaaaagtcaaagaaattaattaacgaattgaatgggaaattgttcaaaaacaggaggattcaactctccctatcactacctaaagaactttacttatcgaaatccacttccgaagctactgataatgatactattaacactgctgaaactaatggaactccccagggtgataccactccagaggataatgttggtaacagggatgaacatcagaagggcgatattaaagatacaatatttgtgaggaacctggactacgagtgcacagagaaggaactttttgagtatttttcaaagttcgctgaagttgattcctgtaacatatgcctcaatgaagataaaaccagcaagggaacagccttcgtcaagtttaaaaacaaagatcaactcaaacaagtatataactagatcccatagttaaacccctccttaattacatagataactcatttattagatatataaattaatttaaggttgttgatgaattgaattagttgattgaaaatgaaaaactatcggttataagagataaggacctgaataacaaaaaaccggtactcggtctaggttatacactgaggggaagaaggttaaagcttgacttggcactaccaaaggaagaagcaagaattcttaaggatcagaaagctgaagaagagaataataaacttaaagaacaaaaaaacctacatctgctaatggttggggttataaaggaagactcaccacaattcggtaaactatcggaagaacagaaagagtcaattaaacaatcagtagccagcaagctggagaagattaagctgaaaaacacatttgttaatccaaaaagtattaatttaaagagttatttagtgaattttatatttattctattttatttataatagtgatttattctgtattaggaatatgtataaagaacttaccacccaatgtgaaaagtaacgaccttagaaccgttatatataatcatctaaaggccagtctgagtacaaatgagtatttggagttgaagaaacttaagaacagaggcatcgtggagttaacgcttctgaagggtgactcctacacaaaggatgaccagggaactaaagtgaagaaaaagaaaccgtttgcatttgtagaactagttaaccataatatcgcaatgaaaacactaaagtttttctcaaataatcaaactctatacccacccaaaacactccagtgtgaattcaccatagacactacaagaccaaccaataaaccaaggcccaagaacactcaaaaaactaaaaggaagacatactcaagaggtaaaagacaaagagaaaagagaagattgatgaaagtagcaacttaaaatacttattacaatattatctatatactacttagtaaactactatactcatactgctgtgaatatacaaaacatagtatatagactatagtacattattaagcgataatatagtacatttattattgaggaaattcatctccgacttttatggaggtggatgaaacgcgaatgccttttttgtccaaatttacattcctattaacagtgaaattcctggaattgtcactatagcttgaattgtcattgaaacctgaaaattaatgaaaattggtaataattaactaaataaagatttaatttatgtgttataatttaacaaatatagagttaatagatatgtaaaagggtacctaagttatcttcgggcttaacttcgggtttgctgagattgttgatttcatccttcgtttttagcctttcctcgagtaaattaatcctttcattgcgaacagccataattttgccctgctggtgctgaattgacctgagcatggtctttgtggcgttttcagactgagataagcattctttgagctggttgttcttctccttgagaaggtccctctggcgcttaagctgttgaaggtggtttgaaatctcagcgagttccctttcctcaattttgagcaaattggtgtcgtcctcaagctgtttcaagaacatttgacgggtgttctgaagaatagactgctcctcgttgttcttgtcaatgttgttgcttaaagcaacgttggagacgcggatactctggatttggttacgaatctcctgaatctggtcctgaacaatggatagcttgttttggagaagtgaacgtcttttcgacatgttctgactgtcgccgacaatggttctgtactctgccataaggttctcaagagtcttagtgtcactcttgagcttattttcaatctcactgcactcgttgttggtggacgaaatggagctcttttcagagttgatggcgtccctcagggtgttgagaagattctcgcactgaaggattagatcattagtgatgtatgtggctgaaacttgaggctggtcatgttcattttgtacaaaagggtcactcctgatacccttctcccccattttcactgcagacttcttgttaacagtgttggctatctgaggtggcaaattcggtatatttggtgggacagttggaacagtaacatcaacaggtaaaggagtttcaggaggaggagtttgagccacactgtcataatctgggaaattgtcagattgcaaaaactcaaaaagaggatcgggaagcaacttgggcaaggagccaaagatatttatcgattcgcaaagcttctgcataacgcaaaactcacgaagattgagcatgccatctttgtcaaaatcggccaagtgccaaaggtacatcaaatcgtcagagcttaggtttgtagtcttgtgataaaagttcctggcatcttcacctgtcaaatagtcatccaaactgttggtcaactggataaatgtgtacttgtagccctcaaaatctgaacttgaaattacgaaagggtctgactcaactggaccctctggcctggtgttgttgaactcatccgcatggttgaaatcgttctcagtgtcgggaaactggtcgttgggagggttattaaactggaattcatggttagcgttttccattggtttaaggtggtctgataatacaagaatcggtaagcgttcaggaatcttattcatgagaaaacgtgcatcacgcatggcttgagggccatataattgaatgtgagcaatcatcctcatgcaaacacagaaacctggaaaatccaactgaccactatgagtcttgtcgccaagttcccaaatggcaaagagtaaatcgtcatccagacctgatttcctgaagagaaaggatgcggtatcacctgaagcgtaaccgtagccatccaagtcacactgaacaaagaggctggagtaaaactcattctcttcatgcgataaattgatacggctatccatcttacttataatacaattctaaatgttttcgattatatttatttattaaaaaataaagttacaaaagttttaaaatagtttgaaattctttttaaattacaaatgataaattttgtttagcggcgatattatctctaaaaactggagtttagacccacaaataaaatgataaattctgaaataatgagttattggtgattaaaaaggtagtgagttgagaaattgttgaaaagaatcttcggtgagagtttagtgattcatttgtgccgatatttcaaaaacagcagagaatttaaaaggctttatttctggaaaactactttaaattttaaaaaatttaaactacagtgaaatatgcaacaattaattgcgtttaataatattttacagggtccaaataaaacttagttttaaaagataaacataggggtaaaatcacaataaaacactaaaattgtgcatttataattatttaaagaatattacaacttgttagaacgaattataatgtaaactgcttcaacatggagataaatttctacaatgggggattgagtacttggtaaggatcttacattatattattttttttgtaaaactcatataattttgtttgtagttttttgttttattatctcttgtatttatgttcaaatgtttaatttaatactgtaaattatttagatttcaaaaaattacatgaaacacacccgcagctttaattatatataatctgtatagtataaatttttaagtcattttttgttgttttataaaggaatttatccttctgctttagatttatccaaaatttaaattttcttataaaatatcaaacatttaaagataattaaaattaaatttttgaaaaaatattactaaaagatttaatacaaatatttatcaacagttttaagatacaaatttggcggattccttcagaattttagtgaagttaacacagccgccatccaagctactaaattaagcaaaatgaattttgccacaaagtttttagattttttaagcatcaaaaaatcaagagatgataaagatagctgttttatcaaaaagaagtttgtttctattctatttatatatcaaatattactactttacatacttaatatttatttttatttaatgtcatctataatatattttttaaccttttactaattaatgatttagtgtattttacgcatattgctgtggaatcgtgggatatttgggaaatgaagatacaaatgagatactccttcacgggataaacgcaatgaagagcagaggctatgactcttgcggtgtttgcacacttcatgacggacagttgaaggtcacaaagtgttgctcagtggaaaccccggcagactctttcaatattttgaaggataaggttcttgccacacatcctccatcgacagttggaatcggacatacaagatgggccacagtgggaaaactttcaaacaaaaactcacacccacatgttgatctggcgaaaaacctggccctagtgcacaacggaacaataagtaacatcgaagacctgtaccacgattactactcccagttgttaaatcaaaaaaaatataaatcctttttcggaggatcaagcattccctcattaaataccactatttgtaatagtgcggattcgacgacaagcacctacgaaagtcctgatgagactgacgaaaagaatttccagttgccagatagtgattcggaatcagtggcgatttttgtaggactggaatatgaaaaaactggagacctgcttatggcctttaaaaacacaatcaagagattaagggggacttgggcgctgtgcatgatgtcgcagcactacccaaactccctgtttgtagcagcacatgaagcaccgctgcttgtggctaggtctgaaagaggagtttacgttggatcagaaccgaatgttttcatgaagtatgttaaggactgcatagtgttaaatgacggagatatcctggaactgtcgttggaaaatgtagagagttattacagccagtacaatttgttgaaactggagtcggaagtaattgaggagtcccatgaaccgcatccaaattggtataccaaagaaattctagaccagatttatattgggagaattataataagcctgttgggccaagcgccaaattgtttatatcaaaattgtttagccgacagaacaccagttaataatcaccaaaatcagaacttagttctgagtaatgaggcaagtgaattgatgaccctgagagataaatattctggtaatgataacttatgtgtgatagaaggagatgcaaactacgataatagtctattgtcgaaagtggatatctcttcatttggattcgacttccccaaccttccccaagatattttaatcaagctcaagaagaccaaaaaactgctgtttgtcgcctgtggatcaagtctccacgcagccacctatgttgccaaaatactacaaaaaatacatcacttcgacttagtggaggctgatgatgcatcagatttaacactctacaggtatatatataatacatataatactattgtttaatccatttgtttccataaaattaataatgatataggtatcatgataaggatgtaacagttgtgcatatatcaaatagtggagagactttggactgcatactcgcattgaactttattaagaggataaacccagactgccttagcctatccatcattaacacaattcacacaacacttgaaaggtcatctgatgcaaccatccacctgagaataggaagagaaaaatcagtgccttcaaccaaagctttcacagcccaggttacagtcctcttgatactctctttgtatatcattaacaactatgatatcaccatcgacccattagatgatagcaccgactactgcagtagtgtggataaggatgatgaaccaaatgaatacctggaaatgacaaacaaggattttgcggaccaattgacgacagacgaagatgagggtgacacgtataacgaacactatggatcttgccataactacaccatttcctcactgtataaatcactctcagtcttcccatcagcaatttcacaattactcaaggtattttttacaccattagtataatagaatattcagttgatttatatatatgtaataatatgcatatgttgatgatgattttagaatgatgaacaatatgacagtttagcccaatggctgttgaaggaaaagattgtgtacatacttggaagaggatgtggccatgcagtggcacttgaagcatcactgaaaatgaaggaagtggcgtacatacaggcagaaggagtattgtcaggagcaatgaaacacggaatttatgcaatgattaaggaggaggacaccacaccgacaattagcataatcacctcggaggataaggaaatgacgattaactcaacgatgcaaatcaaggctagaggagggtacattattgtcattacggacttggaagatgaagtagacttcgcagatgtactgatacgaatcccgagtatcggagcactcacaccagcgctggccatcgtcccaatacaaatcattacatcgaaaatcgccacgctctccaaacgaaacccagacatcccaagaggattagcgaaaaccgttacaacgctataatttatttcatcactatacatatatactatgtatatgtttgtatatgtatgtgtgtatgtttattggtgtatctacagtagtataaaactagtattgtgcattggtatatagtatttttagtatattaagggttaagtttatagaaattagaacatttttcaagttcagaaatgattctattctcttcgaaagtgaaggaatcagtaataccccaatgacaagattgaacagtctcctcgagcctactcaacctaagacatcgagtagcagtaatgagttcatttagataaagaagagatagaataatagattttaaattataatgaactttcaaagtagcaattaacctaaatacatttaaactgtcaatataagattcgaaaattgaaattgtatcaggatgttgacatggaattttagaaacaatagaactagtaacaaggggaggaacatttaaaaagcttgaaaatgactttaaaactggaggaaagaggaaactctggaccacttcaaggtcaaattttctgagattttcaagattagagtcggaaagggaatcgatatccgaaatacaactgaggtcatccttggaaaaattaactttctcaaaaaaaagtacagaatcagtggttattgactcttttaatgttttgagatgatttagtttgtcatctaaagataaatcaatggattttgaaagtagcatagtgtatggaaggtcattaaaagtggttaatttgttaaaattagatttaaattcatcaataatcaaattagcaacctgtaaactattagtgtacaaagtatttccaagaggtgttagaagaatcctattgtcgagaagaatgttataatagccagaattactaatgattgtaggagttttagtaagaaaaggaaatcttggactattggtcaattttatagtttttgaaccttttaaggtggaaaacagccttgaataaggagtttttatattttttaacccattcaagtacattataatacatgattaagtatacaagattaaatattaaactacatttaaacaatataaatacagtaaaaataagtcctaatatacaacaaataataaaaataaataataaaaacaatggaatcacattttaatgattctacaccataatcaaatgattctattattatattttaaataattcgacgatttgtttaaaaattcttattttaattattaatttattcatattttgtatagaattcaggaattttttcagagacagtgagagtacatcttcgttctcgtgtaatgataaacacttcttaactgggaaaaatagagtttatatattttataaaataatttaattaattcctctaaaaattcaatatggcagtcaatatcttaaatagcagggcagatagccttcagtcagttgccgccctggctactaatatacacgcagcaaagagccttttcgatattttgaagaccaatttgggccctaaaggaacgtgtaaaatgttagtaaatggagcaggacatataaaaattaccaaggatggtagcgtattattgagtgaaatgatgatacaacatccgacggcgatgattctctgcagagcagcctcagcaatggatgaagttacaggtgacgggaccacaagtaacgttttattctcaacaagtctgatgaaaaatgccgaagagtatattttgtaccagaacgtacacccgaaatatttgtgtgatggttttgacctaagcctaaagaaacttgcagatattctacccacacttgccgtcccaatatataataccacaggaactaatggtgataatcacttggaatcaggagaaattgattgggaattgatgggtaacatagtgaaaacatcaatatgtacaaaattaccatataaacttgctttgcatatttcagaacaagtactcgagtctgtgaaaataatatatgaaccaggaaaacaacttgacctcttcatggtggaagtgttacatatgaagcatcgttttgcctcagaaaccaagttaatcagaggaatggtcatggaccatggtacccgtcaccctgacatgcccaaaaaggtcacaaaggcctttattttaacactaaactgcagtttggaatatgaaaaatctgaggttaactctggattcttctatgattcagccgagaagagggaggcacttgttaagtctgaacgtgagtttactgatgaaaaggttagaaaaataatcgagttgaaacaaaaggtctgttcagaaaatggtcacagcttctgcgtcttcaaccagaagggaatagacccaatggccttggacatgatggccaaggaaggaataatggctctccgcagggttaagagacgtaacatggaacgtcttacactttgctgcggaggaaatccctgtaattcagtagaagaccttaaaccagaagatttaggatatgcagatatcgtatacgaagtagtagttggagaagaaaaatacacctttgttgagggagtgaaagacccaaaaagttgtacactcttaatcaaaggcagtagtgattacagtataagccaaattaaagactcaattagggatggccttagagtagttaaaaacgcaatcgaagataagaaagtacttccaggagccggagctccagaattaatcctctacaatcatcttatggtatttttatatactaatttatattaaatattcacataattataatatatatactaaaatgttaccatgatgatataaaaaatgtataggaatattctaaggaagttagaggaaaggcaaaatatggagtaatggtctttgcagaaagtttactcgtattaccgaaagtattagcagataacgcaggattagatggaaaggaagtggtgttggaagtcttggaccagataagggaatcaggaagaacactaggactagatctagagaccgggaagtacctagttccctcaatagatggagtctgggataactacagcgttaagctccagacttttaccatcgcaaccacagtagcggaacaattattactggtcgatgaagtaataaaggctggaaggtctatgcataacgctccttcgtaatattaaagttacaaatttaatgtaataagtgtagtattatatttcatatataatttaataaaattaaataataaatatgacaattgtttaataaatataaaaaaatatttaaaagtgaaatcggtaaattaattaaatgaagataaaataaggaaattttaaaaataacaacttataaacgaagaatttgtaatttaaatactaaaataaaaacaaaataaagtaataaaatgtgttaaataaaataacaaatgtgtaaaagtggaacatcttgggcattaactagtggtataacagagtatcagaaattaaaggatttataatttcattttaatgtcaagttattttattaagttaagttggtagtattttatttttaatttgtatagtatgtgttagtggctcagatttcaatttatattttaaaaaattgccttttgaaaaatagttcatctaaattttagttttatcttaatttatcagtgattgaattttatttatagtaattttaatttaaaacagtaaaatcctattaaacgtaatggttagaatatagttaaatctcttaaagtttattggctttacacaatgagttggatttggaaggatcaaagttttatggaacacgtttgcaacgagttcctgtcgttcaaccttggctcagtggttccgccaacattactgtctccttccgcaaatttaaacgcatcggcgaactttatcgtaaggataatcaataaaacgttggagaagaacggaaatttaatcagttcggacgtttataagagtattttaaaatcaaaggaagttataagcacaacagatagtatattgtggcaacatttacaagatgcagttacctcagcggcaactggtaattattccctgttgtacggattcatattcagtatgataaacagggtgcgagacttgcacgacgatgagtggattttgatacctggaggagtgcttttatccgaaaatagtccagtagaacagctgtgttactccatatacaagtgcagaggcgcaagtacgtacatcttttgcgtaatcaacaacggtggccacggattaaagtatcattcctgtagagttaacaaggggattaaactgggaaccatacagagagactccacagtagtgctaaaagacgttaagtcagactcactcttacactcatctttctggttcatgctttacaggcttctgtatgttccaagttcacataactatgaaattctctacaccgtacttttaccatttctgaataataaatctttgttgttgaactggaaattggagacaaatgcaacatccggcgggtccaaatttggaacgaccagtaactcaaacacaattaataatagtaaagtgagctcagacgacgcgggtaacaaaaagcttttaattgaggcttttacacaacttcatgaaacacatgagtcaaaacaggtaaagacagaaagcgcacgttctctgtcactggaactaaacagtaacttgggcggagtatggtttgacgttccagtaaacaaatataaaccctcaacagtgtttgactctttgatgtcactagttgagataattctcagacataacggcgcaaatcagacggatattgacttggtgtttatcatgctacagctttcaacgtgcttaatcatacacgaagatattgcgaaactgacaccaagtgaagcacaggtgcacttaggacaccgaagtaccctattgttcatacaactttcctgtaaaaaactcgcaatgatggtagcggagttgcttttgcaggagtgtgggaagtctaagttgatagatatagacgaggatgcactaactatagaacaggcatcagacttgtcaaacgctattaactcactgcaaactactggaacaaacgcagttaattccgtgggctcaattaacacaaaaaaggaattgtatactcttatatcacacctggttaatagtatagataagaagatgtgtgaagttgtcccagggaaattaattggtatgggtaacgggtcctgtaccatggatcgcaaaatgtgctcaatcgcaaataatttcggtttaaacttggagttcgacaattttggaaagttcagactggatggagcaaatgttaatgagctggctaaaggtacacttaagtccttaatactgttgcctgttgagttgaccagcgtagactacccagtgaaagactatacggacgtctgtaaagtgctgagaaagtgtgtccagacctgtacaattttaagtaaccaaagggatgcaatgccatacacatacgcatggaggtatcaactcattaagcacgttatcctgaacctgttaccaataccactcccggtcacccatatggacgattactctgaagggaaaacggacttctggagcagtatggatatgttaagagaaacacaacttgatttgttgagactgttgcagttactggcaaggcatctgtgttgtgtgttctgttcgctggttaaaacaagacaaattgaaggtgaaaagacagtgttattcgcggccatctgcgcagtaactgatgtcatagttaggaaagtagccgttgataccccgtcatatctgtcacttttttattcaggtatttttcaaacaattactatatttaactgtatatttgatatatttagttgtacagttattacacgtatccatacaatcacatgttgaaccaaatatattctgatgtaggacgttctgatggaccgattggaagttttgggttttttctaggaaatttcgcaaatgaatcgtcattctatggactgacagacccaatggtggtaattgtgagaaataagttgttggaatactttaaatccctcgaaaagacagtggacaagtataatgtgcttttctcgtgggaaaataatatggaaataagtaaaggagatgaactcttgcttcagttgctgtcactccagctaggatttaacaggaacccagacgatatcagaaagtattacattaacgagtcgagcgagtttagttgcgtgttcccagagttcgcaaacttgagagatgtggtgtttttggcaaagtcaattggatggtcacagaactcaatcagtgtaagtagatactctttggaggatagtacgctaaagtattcattgaatagcagtgggagttcaagctgtacaataagcgtaaaggtgtttggaaagtcactgaaggtttctccaattgtaaccagcagtaagagaggagtaaacgtttcatactatagaaaaatgatgaagtggttctcaggaagcagtagtaagaatataacaagcgcagcagacccacataacctaacggatatagaaatcaataatgaaactgacgtgttacacctgagttcgttcccagattatggaggaaagttgggtagaagagatagtgagattttactccagtacctgactgcaagttatgtgagaatcccactagtgacgcagttcttcagtgatgaggcgaaccttcaggctttggtgagtgaagaattacagaaggtggtcgtggcaagtatatttgagcctggaacatggcagagcagtacaatgggatcgaagttgccacaaacagcaccagtgcaaacaagagacgttctatccacaagtctaggactgttgttcaacgagattttgaactcaccaaattgcctattgagtagcatcgaacagatgttagagctgacactccagagagatcatcaagtatacacaggagagtcctctaaactactactgttcatcacaaaattggcagtttatgtgtcaaactatataaagatagtaatagagtataatattcggtgtaaaagtgagtcgactgaaggatttaatttgcaaaatttgttgtatgtgcctgaaatagtagtggatgaggataactttaaagaattacaaaatttccagaatagaataaataaattactcagagaatccgcaagagtattgaccaaaagagcaatcaaggcagagatagcaaatgaacataacgctgctgcagcttcaatggcgcatgtggcactgatatataattatctgattttgctaaactatcaaagtgggtctcaatctggaagaagtacaggcagatcatcttccgggcaatatgatgatttacatttaaaactagcaagttgtatattctttgtgtttgtacatcaccaatttaatgttgagcactatacaggaatggatacagagattgaagaagatccgctctgtcttccggacatggaaatgtttaatgttatgcaaacttcgagaaatttactcctgaactacttcaggaacacaacagatgttagctccaagatggatcatttagtcaaggttgtatcaaatctaggttcaacgagtttgcaaaatcaaagtgcagcatctgataaaagaaataatctgcctgataattatgagagtcagaaagaagttgatatttggcaggagatattgacgccgagtttgtctggaaggtttacgaaagcatcagcggcacaaaaggcactcttacaaataacaaagtgagttaaacattataatagtatcataattatatatttaatagagtatagtaatagtatactagtggtataataataatttagtagtggagatgaaattgagcttgatgatgtgttgctggaaagcttttacgttgacgaagagtttgaagacgcaacacagacaggttggggatttgattcccaagtgacaactggaattaaagaagaattacaaactccacagcccaaaggtattttttatatattaataataaaaatacattagttgaagataaagaaaagcatgataaaggattagtcgcaaatacaaagagccaggtgataagtaagacaaacaaggcaattaaacattccaaatcactaggtaagaagatgtatcgaaagttgaaaaagaagaagaaaacagtagaccaagttacaccactggataagtatgaaaattggttgaaaatgaaggtaatgcagcattgcgatatcgagattaacttccaaacggcagagttctcacttaagaagaataaactccagctcctgggacactgggtgaatcagtatgaccattttgtaaacatatttggaaaagtaacaaataaaactacaatacagtctgcaacagtgcaacttcataagaatcggcattggttacgcctgacaggaagggattatgacctaataaaatgggaaccagatgaacaacaatatcaactcacaaacaaaaccactttcaagtatgatttacatacctctatacacgtaattattttgatacatatatttatgtacctgtatatttatattgtgataataatgatgcagatataataaccctccgaagggtatggaatgggtcacaaatgttttggaaccgtttatatcacaatacgcatcgaaatggagcttttttatagacaaagatgtggtttcaagcctgaatcagagttcatcaagttctgacggattttatgatgatttcaagcatccagatgatgaagtagattcagtgagaatatatgcacaatatacagctccaatccaaccaccgtctggaggaagttataacctagtgaccacaaccacaccaaacaatgatattccagtggatttgttttaccagagtaccatgtgtaaaatgattgattatacacaagcatatgcaccacaggaacacgaaggcttgattagaattgcaacagatacattcagtaccatcagtaacgttattacagatacagcatcaacgataaccaaattggcgggaacaagtagtagttctaaatctaaagaaaaagaaaaggagaaagagaaggaaaaggaaaagagttctagagaaaaaggtgttaagaatagtgtagtaaataaggaaatatacgtcacaagaactccaccgtgtatatatgtttttgatattctggaagtcggaagaacatggtacagatcattatgctactgcagtgatgtgacaatgtcattctgttcatcaataccacgatacataacaacagcaggtaatttctcgtctagtggtaacctggcaagtaaaagatgtaacatagtacttggagatccgacagaccttagcaacgcggccagtgacccatcactcttaataattcgccataaaacaatgagtaacagagttgattcagtacaaaggttaaacagcattgattcatcctcatcagcagattcagtttcccataaaggagtggaatatgaaatgtatgtgttgccaaaattgttatatggtttactaccccaagtgctcttgtatgagtaccagttttggcagaatctgaaaacttcagatttaatcggatatccaattaaccaacctaaaactaactctatggaaatgggattggagatagagtctgaggattcagtggtagaagacgttacaaagaaaaactatttagtagtggaattggtgagtttaggaccaatagatacaggatatttccaacaatcagaagctaaagcaacagtatgtagaagaaataagatgacagaagaggtgtattatttggtaaatttacaaaacaccaaggacacaacgataagagattttgtatcaacactaaccagattagatgatttgtcccatattttggcatggtcattacaatctcaagtgtacgatactccttcaggattatcaccagtctcagacaaaattactaataaaatcgacctaattgagtattcaaagcttggattgacatttagactggatgcgacaaaggcaaacagtaaccgttatatatgcgatgaatataatgggttgtatttgaattatggagatgttaactcaagcccactaaccagtaagttgatccgaggtttggaaaactcgttgttgttgtctgacgatgatggggaattgtacattctagtaagtacagttcgttgcccgatgagaatataccccaatgtaccaaactcacatgtggcttctactacaatctacaattatttggtaggtttggcctggccagaactggtttacgatggccataatccaaactggcttaataacttggatagcagacactatttatacaaggtacacaccagcaggtgctttctctttgtgccgacaagctcaagtctactgtatttgctaatgtgcaggttcctggatagacaatatgaacaagtttgccgtctgagttcgaacatgatattcgatcaagtccaaaacgatgagtctatactattctggtcaataatatctaggattgattcgaacagagatacacacccagatgcatacgcaagcagattacatatacttttggcagcacataaacaaggaatgacagttagtaaaggaattaacatacttactgtatcaacaaataagtttaaaagaggatttagtgcatttaagtcaattttctcaggtcgacactcatctgaaacatcaacacaagataagcatgtgtccaacagcctaaataacacacaactgaaccaagagaaggatgataaaatatttataaattggatactccatcaagagttgtgttattatattaatttgaacagatttgtaagtgcaggatgcaaattaagtgtggaggaggaattagagttgttatctctgtcgcagtcttatttcagtagttttccacttttatccaacaggtactatctgctcaattctcttaaaaaaagtggaaacacattgataagagaacatgtggtgggtaacgatgttgagttctcagtaccgagcaagccaacagtcacaaatttcgacgagataattgaccgttcagtggtagataaaaacctgttagttgatgcagcaacatcgtttacgacaataaggtataaaagaccccaggaaatgcaaagcggaccgaactctttggagtatgtagataaaatgctacaaaaggggatgacaatctcagagttcatgaccgtttacgagcttttgctgggagtgttcccactatcaacgttcccaaatgaaagtagtcacggctggggggcgattctgaccagagtaataagttataaagaaaagggttctaagaacgtgatgatgtccacgttaaaggttctatgttcaaacccgtcactagcacctcatatgccaccatgtccagaggatttgaataaaaagaagcaattcacagcaatgtttacaagagtgcatcaaccagtacataagtttttgggggacctacaaagagtcttcaacaagttggatgaagataaggaaatttcatgggattcaacggccaaatcagttagtagaatagattatgtgattaaagtggatccagtaataccgaaaggaacgttgacaacgccgtggatgttccgttcatactctacagactacggaagagcacaatttaatatgaaaagttgcacagttaaatcaataacaattacaaatgatttgctcaaagatatgtcaacacaacttatttctgaatccattttatcagatttgtataactctaaaacaaatggagttattacagatgacgaatatggatttggaaagaacaagaaaatgccaattgaccttgacaaccattggataatgaagtatgatgtgtgtaaaaagtatatggaaagattaaaggttgaataccagaggtatctagaccagcaggatcaacaattagtgatgatgaacgcttatgtgggatttgatgaacagactatagataagacaatcaagggagataaagaccagttaaccaaaggagtatcacaacttacaaccctaaaggagaggttactgaatttattcaagtcagacggacagttcatagattcctcaatcaagacagtgttacagcaggcaaattctataacttcaggaagtttgccgtccccagcggatttttctagtctatcccctcaaaatcctccaaatacaacagttgatggagttaacgcagtggtagacaaaatgagcaaagttggagggaatatcaagacgttggtgaacacgacaattaaacaaggaattggtaaaaatacagggattaacattaaaaatgtgattaatacaatgactaaaagtcaccaagtccaagataatcagttcccagtattaaattacaatgatggaaatttggcatggagttttgtgtttggaaagttaggaggtttggaaaatatgataacgtttgaacatttagtggagtgtttggtttcaagtaaaggtgataacagtttgagatatttaaacccatttatctcagatacaaacgagatattctccttggttgcagtgatcatgttatcagtaaaccgccgaatacatgtggccaagtgtatatcactgctactctcaatattgcaggcaattaagaggttttataacctgctttcactgcataccactgccagtacaacagatgagattaacatgttaaagtgtgaaattataacctcatcaaagctgttgtcggagaagttgaagatatcaagacactatatcaagaatgagggtaaaggaatacagtttgatccaagattgctgcttttcgagtttaactgtggcattttgctgtataagagacaagttgagttggtggaaaactttacaaaaaacgcgaaaaacaataatagctgttgtcaccagatgattatgggagaaggaaagacgacaattgtagggccacttctgtctttgttgctggcagacggagagaaactgtttatacaaatctgtccaaactcgctccttgagttcacgaggtcaacactaagagaaaccttttcagcagtgattaagaagaatgtttacacattcaagtttacaaggtttgataaggctacacctgaactatatttgaagcttttacaggcaaaacagaccagatcagtagttattgcaacaccaacaagcataaagtcacttttccttaaggttttgtactgtttccacaaattggagtcaggagaacttaagcgtgatgtatctagaagagtgaataatttgcataagaagttggtaggtatctggaacatgacaagttcaaaagtggtagatttagcaaattcaacaacaagatccaaggatagtagtactgcacgttcaccaaaagataataatagtaaagataaatctaaaaagtctaaagataaaccgaaaactaatgaagttggtacctcaaacctaaacaatgactacgtataccaaagagatgtccagcttgagttagatatgtgtctgaggatactggaactatttaataatgcagtgctcttgatggatgaaattgatcttttgttacatccactcaagagtgaacttcactggccaatgggagaaaaggtgccaatatcccaccttaacaatagtgacttccagataagatggttgcttccatggcatatactgagagtgctgtaccaaaatccagaagaacaaattgcaaaaggagagaggtttatattcacaagaattaaaagatgtatagaagaggcagtagttaatagttatctgtcgaactttccccatataatcctattgtcagtcaagtggtaccaaaatgagttgttaccactaatggtggagtgggtgtaccagttcttgaggacaaaaaatctagtggtagagacatacaacgaggtgtatcaatacattgttaacagaaatgtaagtagtaacttgagaagtgtcaaagttttggtatttgcaagagattggctctgtagcatattcccccacgtcatatccaaagttaaccaggttaattacggtatcttaagccttaagcaaattgaagaaggaatgtcatataacccaaatatgccccaaacaaggaaaatgctctcagtcccatttgtaggtaaaggaacaccagcaagagattctgaattttcacacccagacgtcctgatagggtttaccatcctgtcaacaatttaccagggcttgaggttcacagactttgtacttacaataagacacctctgcagtaatttttatcaggaaccggggaaagcagagtttagaccctcatataagctgttcaataagtggttaaattcagtaggctactacgctaatacaactaacgcctctaaatccaccagcaagaacagttaccactacataaaatatgtggaacctacaggaccaacagaattgaaaccagcaaaagccgacgttttgaatggagatttatcaaacaatgttgatggacttgatgggtttgtagacaaagatgtagctgaattgagtgaaatggttgaggaagttctagaagtggatacagaccgagtttggtgtttggatggaataaatgtatttgataatgagcagttgagtgtattgtataaaatattgaaaaatagcccgattgtgattgagtattatttatgccgagttttgtttccactggcaatggagtactgtgagatgcaaatgacagccactgcccaagagctgggatcaagcattctgtttccaacgaggttgggattctcaggaacaccatcagatttgctcccggtggaaatgaacggatgtaatttctcaccaggagttgacgggaagatgattgcagtttcaactgatgaaacaatagtgagtggtccggttctattaccagttggctgggactcagattcgataattaatcttgtggccaactcccctgataaaccacttgcactcattgatacaggagcacttataacaaactatactaactatgaagtagctaaattactcttggtaagagggctggcacacgtagatggtgtggtatttctcgacgatgatgacaggcaaatgatactcttgagaaataagtggaatgtgactctcttggcacattgtggaataccacttcaaaaaagattcagtttttatgaccagatccacgcaactgggcaggatatcaaacaatccccaagagcaattgcctacgtcactataggacccgacatgactttcagagatttcgctcaaggatcgtggcgtatgagaggtattggacaaggacaaaccatcaaaatcattcaaccacccgaaattaatcaacaaatcagttctctaacaaataataaaggaggtaatcactactcatgactgatgctatatatatatatattatctgttatatataaaatttactcaattgtgttataatacgataatataatattgtttagttttgggatgtatatcatggttacttttgaaaggattattgaatgaggttaggttgggaagattgttgattgagcaatgtgtggagaatatagcaaggaagagatcatttcaagcactggtgcatgatcatcttaatataggagggaatgtacacctgggagcacacgtgcagcttttcagagagtttagagatttctccataccaaacacatttgcacccaaagtgacattgaataaaagaatattggatttcagtgcaagacatcaaatctcacacaaccagctcaactcaataacatcttttttgaaccagcaagagataaaggatgattttgttaatatgaactattcaaattcatttgattttagtaaaaataagtataataatggacctgcatacagtttctcaggccatgggtcctcaagaaccagtaatattaatcaaattagtagtacaacacaggatttatttgcactaacagatgacgaagatatgtttgaaactcaagaccagcctaaaccctcaagttccagagaaatgaacgattacctgggaatggaaatcacaattgatgatgagttctcaatggaagctgaacacgagcaagagatggaagtacttgaacaagaagaagaagccacacaaatgcgagaacagatgaaagaagaggaacatgtaacagaggaagaattaccagcaccacactcctatagtagaagtgatgaagatttggtatactggcccttgaatgatctggttgacccgaataagcatttggagtttttgcgttgtcgggatttttatttatacagaaaagatgggcacaaatatacattaccatttccagactacctgtcaataactcccaacttctacaagatcaagtggtcctcaagtacctacaggagaatgaagaatgtattggttgttgtggatgtatccaaccagacagcagatgttagtagagttctccaagttaatcaaccatattcaagcccaacacactctaatcacagttactcagcacatctgaaccagatctcaatacccacaaatatagttcatgatgtcattagagcttatgaggctctggatgataagtatgtatcaagaggacagggtagttctggagcaattgtggacgcagattcaagtttatcaattctcaatgcagtggacccagaaggaccagacgagtgggaactcattagtgaacttgtaatgatgaatataaacaaatatagagttcaaaataagactaacatgattggagtaaatgatttcctctcgtgcatacaaaacttgtactcaattgatccatcgagaagatacattgttgtgactttagctgaagcggaagcaattagagcctggctacataaaaataaaaaaacaaatactaaaatagcactaaggcacctggcggccaagttccagccctttgattctagcgcagtatacgccccaaaatactttgataagctaaaatccttagttggactccagtcgagagttgtcaacagctgcctccgctttttcaattctgaaatacaattctcagaagcacaaattgcaatacttacaagcatactcaagagtgtgagtccacaagataggctagcatactatcaaaacttgagagaaacacgactagtagttcagaatatgaagatggcaataagtttttgtgagttgttggggaaactattctcatacaataacattgacgattttgtaattcgtctgctctcactgaaatttcagcacgtaatggaccaaaagggaggcccatcatgtctcctttcatctcttaaatgtgataaactctcgtacgcacatttggaaaagattattaatccaaacccgcaaaaacctttggccaaaaatgaagaactaaaggcatttttcacaattatcgatgttgattgtgacggagtaatatctctggaagacctgcaaaacatatatcaggaaccaacaaaaccatcactactaaaaattataacatctgttcaattctctcttgtaaaatacaaacaagccaggcttgtggcttcttgcccaattctgctctcgttcacagcgaaacgactcacacatgtaaaatctgaaactgctgtaatatctcaatactttgtacccaccaattccagtgctaagatgacatttagtggttttggcatggatttagaagtgtacatcaatgttttgatgttaattcgaggaaatggaatagatttgtttatgaagccacctactagttttaaagttgtttggaaagaccaaattgacccgaatttggtactttgggaacctgaagctcctactggatactccagcctaggactagtggcaaccacaggaaatcaaccacctagaacaagcatacactgcattccaactaaatggctcgaaagtttagataaatatgatactattgccctagatggatttgattcagacaacaagtcatttaagcttacattgtacttggcgaatggagtactaagtctcaccccgcccatgagactcatgtacgacaacttcgccctccaacaggattttttcgacgactcaaacatacccgcaattttacctttataatataatataatataaaaaaactacattaaatattatttttacagaaattttattaaaacgctattttacaccaaatattaatagttagaggtctttgttgttttcagcattaccctcaatccaactactgccgtatggataaaaaactttactaatttctttgttgctggaatttttcagaaccaggttaagcttagtcgttttgtcagattcaactgttccagttacttttatgcaaaagagatcggaagatgattcccaaatcaaatcatctgaaccggaaccatgagaaactttaattatactaaagccttcttcaggctcatatgtgtaagtaccattattgttagttatacttgaagtataattgcaatttggagcatcttctttcgtctttacatccagataaacggtcttatctgggacccatattcctccaccttggtctattaaaacaacctcggatgtattggaaccatcggttgtatctagagttatcttaacaaggttacctgattgtatagtggttgtgactttagtgcaataccaattaccagtagccttccaaaacagttgagcgctagaacaacacgattttaaaaaaactaaaccaatctttttattatctttgggagtatatgtgttttctccattgttatccttaacagtagaagtaaatgtgtaatcaggtttgtttttgtcgttgatgtttaaagcaactgtgcctaattcatgataaataccacgagtttttgtgaatgtttttgttgtattagaaccgttacgtactgtttctataacaaggattctatctttgcctgatttttttcttattcttacaaattttgagtgttctccgtcctctgccttccaaactacgaattttttatagttaactgtcgtgattatgttcgaatgtgtagtggtgtaagttcgaaaattttggccaccgtattttttatcttcaacaactaagtattcattactgcttccacaactggcatctaatgtgatttcactataatgtgtaggtgattcagaatcaccatgggttgaaaccaaagtttctatatcttccgaggcattaatataaacaaatatgtatagcccggcaagaaaaagtagttttaaaacataattcatataaactgcatttaaaaatctatatttagataactttattttattaatttggatggggcatgtaaaaatgaataacttcaaaataaacatttatggtttctaaacaacatcttctattatttattgttatgtaataatttagtttagtgtattaaattagactttttggtaaatttttatcaagtaacccgtaacattcatataccatgcaatcttaaattctttcataaacatcttataataaaataatttgactatgaaatttactttataatcattatagtagtcttgatatttagttaattttaaaatgtgtaaattgaatgagttctttcgacttgaggtaaaagtgtataatcatttaaatccttaaatatacataatttcttgtgattcgtaatgtgattgatttgataatttgtagatatctgcgtttataatcttagatttgaaatgtgtggactataattacaagaattattcattatttaaggatataaaataacaaaaaataagtattaagtaaaaattaaataaaaattattaaatgaaagaataaaacaaaaataaagtgtttatatatgttaaaatgtaaataaattgtgaatctaatcagattacataatacggtattaaaaaaatgcaatgaaatgaggaacgaactccagaaaatattattgtaattaatgaaatcttagagaataataaaacttattaattgtaacagaatgttttaaatgacaataaatagaaagaagaaatgatgatacaatgtacgggaataagaatgtgtgtagaaaaagtgacaaaataagagtgctgtggaggaaaaaatgacctttataagatttgataagtatatgcataatatgagtgacttttaaataatataaaaattactaattgttatctgcataagaaaatttttcgataatcttccccatatataagaatttattgaaaatcggatatgatttgaatttatgggaattaggaatcatttcattggttctagaaccatcggatggcaagaatctgtgaaatgatagaaaaatagatggactttaataaatgaacacattttaagtatgaagttaaggggttttgacttttaagttagtcatttcaataatggattataataaacacatgaagtctgaccaaagtcagttttctagggatactgattcccaaaatgaagtagaatactgtttttggcaaaatgaagtatatgcaaagcttaaaagctgtgtattttttaaagaacatctttttaaattcatggaaaatggaatatttgcttattcatttttttcctgggctaaaaggtggattaatttgatttctaaacaatatgtagagccttacaagttacacccgctccctgtagctgatcaaatcctgcgttggcaaccaattttttctaaaaatgttagtgatgcactaatcagattggaatcttatgaaacaagacaatatgatcaaccaaaaattattaagccgaacaagtctattatgctatacgctatatttaaaacatttggtaagaatattggtcttattttatttggatttctagtcctttgcttagggaatatgtccatggtgatatttgtaaaaaagattttagatactgctacagggaaggtaatcaacattaaactagtatttatactggtactttcatttgtgttcgttcaatttattatcgtaacactcctggaccaccttaatttttatatgtatagaattatccatgtgattcagtattcattctctattaccatatttcaacacggcctatcctgcagaagaaagtttttcaacaacgtaaacggaactaattttttaaatgtttgtaataatgttttacacagttgttccgcggattcagaatgctcaagaaaccctttgtattgtcccgcaaggaggtatcaaaatagggaaattaattctaggatattttcgttcgaattcatggattcatattacatttctttatttattgagtctttagtatatttattgcagttttttatcacctttagcattggattttattcgatcagtaaaatggtaccaatcaaagcgtggcccttgtgcacgttttctttatccgtgacgcttttcatgataattgttgaaattttaaatacagtaattttaaagcacatatacaatttaaaggattataggataaacaaatctagggagatattatcaggtttccacttgatcaacaagatgttcatagatgatatagcacataacatcattacagaaacaagaaataatgaactggttctggttttaatgagatttgttttatcgtttattaatagattgttagttgtaatatccgtttcattttcactgatttatatgctggacaactacattaataatgttcttaagggagatgacattaaacagttcaaatccagttgtacggtttcatcactgtttgtgcttatcaaaatatgtgatgccatgttatttgttccagattctattaaatttcttacctactctttaatatcactcataagagtagagtactacatgagaacttgttctcccaacttctatatcactgataacaagttcactggatcaactgtaatgtcatacgacgttccagctgtaactaatgaccttgacaaagaggtagttgtcctatataagaacgcttctttttcatggattaacaacaggaaggattttgttaatgacaataatgaggtttatctgaagaatgtgaacttccaacttaagagaggtgaaattgctataattacaggtaatcaaggatctggtaaatcaaatttcatcaaatcagtacttggtgagatgacactggttaaaggttcaatggcagtagttcccctccatacatcaatgccaatattttatgcatcacaagatatatggctacaacaaggaactattagatcaaatattacctttggatacaaatttgatgaagaattatataatttggttgttagagctgttgaactagagttcgatatatcaacatgggaaaatggtgacttgagagtagtatatgataatgctcactcactaagtggtggtcaaagagttagaatggagatggctcgtgccatctatgcctatctcatatttagtaaggtgaacaaagattacaatagaagtcagtgctcattcctaatgtgtctagacggtccattccatgggttagatccctatgtatcaagagttatttttaataacctcttcaatgcaaatactggattgcttgttaaaagcgacctatcaattataattacatcaacagcattggttcttgataaaatttgtctcaacgagggagtgtttgcgaatttgactctttacaaaatagatgatagatccttgaaaagggtaaaggatattatttctagtaaaaactacgtacccaaagaattttcaccccgtatgtccatggtgtgtccaccaaaagaaatgattaaaatttgtgaacctgatcgtagtgacccgacagttcgagcagaaataattaagggaaaatatgaagattcactgatcatcgaccctgaatcaaagaagactacccgtaaatttaaggaatcatttaagccgtatattttatatttcaaatcaacggggttcatgttcatattttttgtattgtttacccttacgtacataacgtttgaaaatgcaacctttacgttggcaggggtattgggagatgacgtgatggaaatagttgaaaacgtaaacacgcctttcgaggcagtgtcttcatattcaaccataagaagattgtgtaatgaaaccttagacaaattaaagataatagccgtactcactgtagtattttgcctttttgcgaacggaattttggcgtatacctgccttcgtgggtgcaaaaggatacatgaatattgcatcgcctccctgatgaactcagagtcaaacgttaagataaagaaaatcagcagtgaagttttaacgtttttgtcgtcagacatctttatgatagacgagaattttggcccctgtttatcatcgttgctgattttatttttgggagtaatcgttcaatctgtagtcttagtttatgcctttccgtttcttgcgccagctctttgtgtaacatttttcatcattataaatttcatttttaaaaatttcatacacgcatcaaaaaatcttcaaatttcatccctagaatccttatctaggaacaattccgtttgtgaaaatgcagtttcatcttcatcaatatatagaagctttaaaaaggagtcaaaccttatggaagacgtcaccgaatacactgattattgcataaggtcttggttttattcaaaatcatttctatcatgggcgtcgtttgcttccaaatttgtgtttttattcatgatcttggtaacacttctagtacctcttacaatcaggagttttaaaagaataacctcattcgtcggcttttacggactagatataatgacaagcgttaggattatttttacattcacgaacttcgttgtcaacatcgcaaaactcgaaatgctaatgtgttctgttcagaggtttcagtgctttattcaaccaggcaccaagtgtatattcgataaattccgtaatgttcacgaagaagatttagtcattgattgtagaacttctggggaccaagttgataaaaaaaacttgctcatgaggagaacacttgagttcaaagacaccaaccccagtgttctaaggagacttatgttcaggccaaagttcaacttcataaaaattgacgatcatctcccttctgtacattcctgtgtagaattgaaggacgtctgtgtgtatacaagttcgagaatgaacaaggaaggcctgatccttaacaacataaatgcatcaacttctaaatctgatatcattggtatcattggcagaacaggtgctggtaagacaactctactatctgtcctccaaaacactgttaggaatagaacgggtcaagttttgttagatggcaaagatttacaagaaattcccaaaagtgtcctgagacatatcattggcgttcttcctcaactaccctttgtctttaagggttggaccattagaaggttcttggatccaaggagactatttactgatgatgagattaatgacgcactgaataaatgtggcctcttggattttgtaaataacattcacggtggaagaagactggatactgtaattattcccgaggatatagatttaaagaagacgaacgatcagtcagccaaagaaacttttactaatgacgactctttaactgaagattttctcaaatcagatgatatcatgttatctgtaagtcagctcagaacactttggtttgccaagttggtattatgtagagatttatacaggatgataataattgacgagccaccatctgataactgctcagaagatggatctgaagttcaagacataggcatacctatctatgaactacttgacaagtatttcaaacactgtacatgtttcgttactgcacactactcaaatgcgttgcgaatgtgtacatccgtttgggtaatgcataatgctcgacttataaagacttgtaaggcttcagaggtatcgaaaaatgaatcgatttcgaacgtaatagaacaacttctcaacaaatattccaggataaattaattttgtaaaatatttaaattttaatttttaacggactttacttgcctaaattttactgtattcatctccataaacgtacactttacactccctaattctaaaagaatatttaaactaacgtttagtgttaggaatcatcattaaacagcctacaaaatatagtttatttttatattattccaccctacttgatgtttgtttcagtatgaccatgccataaattcttacacattcgttctatgtttccttcttggctcgaatttataaaatatgagcttaaattcagctcttattttgtttttttactactatgtacattgttttaatactaattaaatgtttactaatacttcatttgttttttaatggttcttactctgttttagttccttctcccctaaatctttttagaaatttaaataaaattttaggtgatttgaactccaattcaaaatcatcctatttaaacaatttaagcccatatagtcgtcgcaacattataaattccccctgtctaggccatggaaacaataaactagacttttcaaaagaattaagaattcttcctaattataaatattcttgtaaattaaaaaattcttccagattccacaaatttttcatatcttcatctacacatctgtccctcccagatcgtagatttttaggatttgcctatattataaaaaatgttcgcgcaattaaggaatttgaccttttctctcttcctaaactatctaggtctattccacattttgatttaaccaaagacctggataaaattcacgaaccggaagaaccagaaattgaacccattaatgatttagaaaaagaaagaataatacacaaagaattagccaaagatttcattcctgatacagaaacttattcaaaaaaacgctcgaaaaaacaatttaataaggaagcaaatgaaatttggaaaaaatataagcatatttttaaacccttggaaacctatgaagagaagcaagaaagaatcgctaagttaccggttaccaaaatcaatgttgaaggcgtagaagtggaagtgaggatgggcgctttgggccaaccatggtatattgataaagaacaagctaagaaactgttgtctgcatttgaacccggggtcctagaccatattaaaaccaatgaatctgataattatgtttacttcccgttaataaaggaagaagaaaataagtattggatacctctgcctggaataccagcaacctattttccagaaattaaggtgctcgaccataaaagagacataccagattacgattatgtgactcttttgcacgattcatccagaaactattcctggacatatcagcagtcgacagataaaagagctaaatcatttaacggtgatggaaaacttgacacttttgaaatagttgaccaaaaaatagtgcctattgaggaaaaaactaaagaactgtacaaaccctatgtaccccgtgattattttaatgaaccagaggatgcttctcaattctatcccagaaaaacactagacgttggaatctttagacatccaagaatgcaagatcttctaaatttgagtttgttcaaagttaattattgtgtttagagttcaagaatttgtacagcccaggatacaaagaagatcaatttggatacttcagagaatatcaaaatttttggaaaacagtagaatacaggtataaaataagttatacataaaaatacaattttctgttcagagataatggagagaagccaggattaagatataaacaacttgggaaaacagatttaaaaatatcagaagttggtctgggaaccatgatgttcgggtcaagaatcacagaatctgaaggccatgaactcctggattatgcctataacaaattcggaattaatttctttgttagtcaagttttattaattagtttcaggatacttgtgagctgtatccagtaccatttgcatttggaacatatggaaactcggaaaagatactaggaagctggattaagaaaagaggacaagaagtaagatctaaaatagtaatctccacacgaatcgcatgtaataatgataacctgaaaatcataagaaactcaaagttagtgaaaaacgcaaataataaattattagggatactagtttgtcaaaaggtaatatcataaaatcagttgaatcatctttacaaagaatgggattagaatatatagacctgctacagtttagttggcctgaacggtatgttccaatgaatgaaaacggagattacgaccaaatattttttgatgttacggtaagctttaagttttaatattatgaagaaaatgggaaattacgatactggaagaatgagaaaacaagtagaggctattgatattctgatgaaaagtggaaaggtttattaaaccatttttaattttttgatagatcaaggcttggggactttctaacgaaactccatggggagctctcagatttactcaactatcaaaggtaaactttaccttaatataaatgtttaggaattgaatgtaccaccacctgcaacaatacagcttaattataatttgttgaccagaaatgaagttgaaaagggattcgttgaactcgcaagacctcaaaatacaggtaattgaatttgtagtaacacatattcaggaatcggtattatcgcatacgggccacttgcaggtggtattctgactggtaaatacttggaatttgtcgaagctacaacttccgggagattacttaaattcccctcatatatgaagagatataggttgttttattattacataaagttgtttaggggatcacttgcagccaaagcagtccaagagtattatgaggttgccatggaatttaaactcccaaatttgactgcaatgtcattgaaatgggtttattcaagaccttttatattttcaacagtaaattatacttacatattaaatataaattagttgtaagctagttgtaaattaagtataaattaactgtacttacgattttataacattcgtttagattataggttgtaacgatatgtatcaattgagggagaatttatattgtctggatccggaaatcccaatgactgacctcatggaacgtaggatcaaccaaatatactggaagtggagagatccaataagaattgtacaataagtgtgtagcaaataaattaatctaataaattatctcaattatatattaaagtcttcagatgttgataataatcggttgcttggtgtcgttccataatttgagccaagaaataaactacgataaaaactaccatccagagaaacttgattaaaaaggtgttcaagtcattcacataactgtaattcttctcatcaatgaacctcctgtttgcgtcatttccaaaattattgtaatattcaagaaccggaatgcaaccgttcatacctttagttgagcagtaacccatagagaagcaaacgataagtgtggtgaacataatggtcaagaactcagtaagaaacctagattttaaagtccaagttccccatacgacaaagaaacaaattatccatgaaaaagatggtattaacagatacggtatatctcttttgtatagcaacttctgatgatttgtcacattcccgcgtgcaacaaccgtgtcgttagttgagcttgcaatggatcttccaataatatctgagatgttgtcgatgaagaaaactacaatcagctgagtgtcatttaaaagcatcctgtaaggaataaacacttgaaagaatgcgcatttgcataaatctgacaatgtgaaaaccagaaatctagaactgtactttggtaaggaaagaaatatcctatacatgcccttgagctttttaacgcatgatgtcctaattgaaccataagtaggggatacttcaacaggggtgttgacgtaaacaattgactgtgccaaaactgcacaaaagataattatagaaaagaatccatgggttaaaaaaagacagatctttgcttctttaggggtgtcagtcccaacaactttttggaaaagagtctgaatgagagagaaaataccaagacctccgtagtagccagcgtataaatttgagaataaagaagatgaataatactttgaaaccacgaatgaatctaaaaaacaaataaaaataattatacttactggactggattacgaaggcctctagaattgcgattcctgcataaactgatatgtaaagatttttggctaaattccctgaactaaacacaataatgaagaggtaggaaacgtgtaacgtgaaacacagccatcctgatactatcgccttcttgtaactacactcaatgaacaataaaaccaccagaaatgcgaccaaatttaaatatatgtacactgagaagcaatctgaaataaaaacgtttgttccaaaagctttcgaagttaatcttcctgtagttcccaaacaagttactgaagaacctaataaaaagaacagaagcttattcagtacggagtggaatgaaaatttttttttcaacggagctacattatctttgtcatgaggagtgccctcaactattatactaaaatccatctaaaatggatcatggaacgaattattttattgttaacgattattttcattattttttagcgcactttggctctgtactaacccaagatgcaataagtactaaaaagtacagcaagtacagactgtcctttagatctattccaaattaataaatcttaaattttacaaagaaaataataaaaaatccattttaaaacacatataaaatacaattaaaaattaaaatggtctaaatttctgaaatttaaagtacacctgttttgacctgagtccccaacatgaataattggatctaacctccatgatgatctatataataaaaaacttgtttaaacaattttaacaaattgaaatagttaaaatactagtttatttaaaaaaatatattagtttatacacaaataaaaaacacattaagtttaaaatgcgaatttgtttggatttatagcatttgtaaagggtgtgtactcagattttgtctgtttaatattctgtctcgaattatctgatatagagttttgaagaagtttggtcttactgggatcccatcgtattactattttctccacggacgatagtacttcggtcccgttgctatatgatcctgtgcccataaatatcctcgttggtaactcttgctttgatttaccgttatcgtttttattagagtccttgaaagatccagcatttggatttataaatttccagtgatctttatttgggacttgcggaggctcatttgaatatattttacatatgtcgtcgactttgaataacgattcgtccactttactgaaagttgctctgcagctgtaaagccaaagcgtgtgaaccttatgtatatgattgtactgtgggtctctgcttttagtgatgttgtccgtgcagttcttcccagccatgatgtgagttagctttgaatcattcaatctcaagactagcgaggcgcccaactccaaaagattctccttctgcctcagttcacaatccgcatgtaaaacagaattggcaacctttgtattcttcctgtaacctgtaagcaaaactccaattcccttcaaaacctgactctgaattgattccagtatggacccgacgtcattgttaaacggatcagcaaaaaaccttttgtgtatctcgagaaaaatcttaaccatatacttcaaatgcctatcgtaatcaacaatgctgaccttttcgcgagtgacgtcagggtcactttcagactcttgttcgatgttaaaagtatagtcgttgacaggtttcccaggggcacttgaggaaacattagtggtcaaattaaaactattagattccggggtctgtttatttgatggagtaggagaactagaataattattattcaattcactgatatatgactcgaagaagtcgtaatgttctgctcttaccacctgcttatgtggtatgtcagaccatacatctcttctatcatcaaatgcaagtatgaacctagtatccaaatccggatacaaccttgaagcgctttttaataaatccttctcatctacactgtttcttgcaactattctgtccataaaaagtgacctgtccgggtcaagaatactgataaccacgtctgcatattcctttgttgcgttagtataaatcgacatttcgtagtaaagagataagatttgcaaaaactcccttatgcagggcctcaacttcatgtaataatttacattgggaaaattaggtagggtaaatgtgtacaactcggggtctcctaaagaatccacaaaatcccttgtatcaatgttcagcatatccagtctactctgagaagcagtgtgtaatagtgtattatccaaatctaaaagaagcacaagcttgccgttacgaacaggcccagtctcaaaaccacttgagagtttcgggtttaaagacatatttttcaagtaagccttcacacccagtggaagaaaaaccttcaactcgtgcaaatcatactcagttttatatctttcaggaggtttcggtaaaaatggagtgaaatactttatttcgtaggtagtttttgaagtagcgtcaattctttcatttttctcattatctgatccagatgattcctgatcatcagagatctcgctcatcgtttcatagtttcttttagttccagtactcatccccttaacctgtgaaagattcacgaatcccaagtgatcgtaattgggattgtgtatcggaggttgcttataagtaattggggggataggtggttctttatagtaaggtccttgaatgaaaggggctccaaacctgttttcgaatacaggctttgcctcaactccaacattcgccattgggaaaatgggcccaggcatgtatgaccctggtggaatgtttacagatggtcccatgtagttccccattgggaactttaatttagggtccttgactcgatcatcctttataaccatgtttgggtaaaatggttgattaaggggatgatagggaataatccctggtggttgttttccaataatgggtggagaaggaggaaccactttatagattggaggtgatgtaggtggtggttcaggcttattaggccattcagagttagggatgaacccaactttttgtcgtgtccgtcggacccacggattgactacaaagttgcgattgttggattcagatgttgtttgatcagttccaacttgtggaggtgcgatggaatcacccgtaaatctgggttttgacatctatcaatatatagttaaatacatatcaagttccaaagtaaaaagtagcaaccaaaagccagtaaagtattttttacctatcaacaacgattaaaccttaaacattgaaaaaggtttaaaagaaaagagaagtaaaaaagatacccttctgtcaaagttagagttgaaacgttacaaatattctagtcacaaattattcaacttaattgaaccaagttttaaacaaaacaaattaacaatatatacttggttaaattaatgagatatatccagtagattaaatacaaaggtagctcctgggttaaaataatgggaataagttttgttcaactccaatctaaatttgtaaaatataataaataaattttattttaaaattcattcatttattataaatataaattaattaagtttgggttgttttaaagaaactgtaccgagtgatactaggtatgtataatttttatttgtgactgttttgtttaatcaatggaatatgtaggttgtgttattgtttatttttgactattgatggctaaatagctaagataaatgagtatcgagtgtagaatctcagtgaaaagaaaataatatgtgagttggagtgaatggtatggggatgtataactttttggcacagccgcataaatactaactaataatgtgatgttaggaaacaaattgaaaaaaaattttttgatcttcaatttcaagtacgattaataaattccactgaataggggatttgcgtaatgcatggcccttatcggagggtgttcaaccgcctcaaactgtgtaaacttaggctcaagagtgtcgcctttaatcctaaaaattaaattttatttaaattttaaaattttagtaaaattatagttaaaggtttttatagttaatatttgttttaccttatgaaggccgccttgtttcccatctggtcacaatagtttggagcgctgaaaatggtgatgactttgccctcatgttcaacctcgtaaccttcctgctttacctcatgggaccttataatgtatgaaaggttgtttttggatatgaatgagttagatatgtcaggcccaaattcgaagcctacacccctcttggatggtgataatccattggaaggtttgggatcagaccataacatatctgtcattaatccagaatcagaaggttctttgaacctgtcgatctttttaaggtcttcgatggtgacgttatcagttccaaacagtcctccatgaataattagaacctttttgtttattaagtaacctagtggcaagtatcggaaggattcacaaaaaaggctgtatactttctcgtcatacttgttcaatatctctcccttgaacccgtaacacttgttaagggcttcagtttcgtgatttcctctaacaatgtggaaagaagagggaaataaaaccttggcaagaaacagagtaaaaacacactcaaaagaaaatgagcccctatcgacaaaatccccgttaaacaaataactgttttcatcactaggttcgccattaattgagaatatgttcagcaagtcatagaactgtccatgaatgtctccgcaaacagttaactcatcacttgggtaaacattcacatcgacaacagattcatactatatagatatattcaattaaatactctcacctctcttatgatttttatcacttccaatataatcatacacacatacttcttgtgaatagtgtttccagggacctaggtaaaataaaaacgtaagtgttaccttgatgtattccaaggtgttgtggaaaaggtaagacttatcaagatgattcatgggctccttaaaggaaaacactaaaaataaattaaaacaatttcaagtacctggaccagtatagccctgatcaacttgaatagagtcaacattaatggtttcatgcaagggtggaggtgactctaaagacaattaaaactacaaaaatacctctagttatagcttcagaaaacttttgttcacgaattatcttcttacactccttcaacttcatcctagcagtaggatcgttacataatgaaagaaccttcaaaaaatctaaaaccagtttacacaaatgaaattaacctgtttccgcatcctgaaacttcaacaaacaaaggtatgcacagcctctacgataatatgccttgaaaaaatcaggccttagttcaatagccatattggcgtcggaaatcgctgaacctaaataaagtaaaatttaaattgcacattaaatttaatcagttagaaatagtaatatatcataatgtatgattaataccatagttttctatttttatgttacaaatggcgcgatttgagtagtattggtgcagatttgtcttcctgagctccggagtgatccaattataaccctcttttttaaaattggaaactaaatgggagtcctccacaaggcgaattgattctgaatagtgttcaattgccgataggaagttgttttcggagaacattttgtttccttctaatttttttaattcagccttttccagggcctgaaccttattatttttgccaatagggaaaatctcaaccatttgtatatttacaattataaatggaatctaaacaacactaaaaaaatacttcgataaaaattttttgataaaaatttcgtctacgtgtggtgtaaacattgtaatatgagatgttatttagatataaatttttcatacaagttcaaagttatattaatttattttttattttgttatatataaataagttgatattcctcatgttttccaaatttcattctaaaattaacatattagatcttatatttacctaattttacataaattttgtttattagttaatatttttgatttaattcgttataattcgtaatttttaaaaatatcgtaattctggtttttttctgtactggaatgtgttgtatttgttaattctaatttttttaaaattaatattattttttatccatcttgattcctttttaatgtttatctcgtcttccataatttagctgttttgttccattttatacttccaaatgacaacacatagtgataggttaagaactgcaaacaagtcctatttgatggttagttttttatttaaaagtggtcatttctatttaaaatatcttataaatcttataaaacaatttttttgataattattttcaaaaaaatagaattttgaatctgacttaggacgttgcaaaaagaaagtgcctcgaaagaagtgctgagccaatatctgaacaacaaatctcagatgagaattatatcaaagataaagattggaaggtcgatagactggaaatgttgagagttagtctttaatttcactgataaatcatatagaaaattcatgaaaaaagaagggaatacttagataaaggttctggtaacctagaaatgctcacagatgaaaaggagcttatcaatattgcaaacagtaatgccagagtggtaaggttttacctaattcaaattatattttagctgtgtcatttctatgaagatgattttgaaagatgtaaacttcttgatagcttattaatgtccctcgcctctcgatttttggacactagatttgtcaagtttgtctttatttcatattttttatctaaataataacaatatatcttagaatcaaagctaccaaagcacccttcttcacacacaaaattggaattaaagtattaccaacccttttggcaacaatcgacggaaatgtaacaagaatttacataggattcgaagagtttggaggttagaattaatttattcattatcaacttacacttcttccaggtgataaaattaatcaagacacccttcgcaaaaccctcttgaaacataatattctgactgatcaggtgtgttttttattgatatatgtcataaattgtctttagtgctgtataataggtgaaaattccgacgatgatcagtctgaccccgataattgaatcacataacataatgtttcgtaaattctaattctttgtacttattatttattaatgtgtaaatcagatatattttaaaaatattttctatatttcgtcccatgctacctagaattagcgaaagggtctatttagatatttttaagtcagtttcaaatggaaataacaggattccactaaaaatcgcacttaataaattaaactctttttttaattctccagaaaatccttataaaaagtatatgtgtaacgattctacaggtatcataaagtccaacacatgtactattattaattcttttaaaaactaataaacacttttagattacaatattacgactgaagaattcatggaccagttttattcacgtcatattgacaagaaacatggattgaggtcacagatattaatggttggaggacctaagaccattcgaggtaatcccggaggactaatgaactctatgttctcatttccacagattacactttatcaatttgttggaatagccaaggtattgagattgaagctcaccttgtaaacatatttaggacatggaatgtatatttctggaaaaaattcttccttgctctcaaggcactaaactaaccagaacgtgtaatacaagtgaattttctaaattacaaaagatgaaaagtaaagagattataaaggatttaaattcaaaagtacaaaattgcgatcatttagaatagagattatggacatcgtccctaatggaagaatcagggaaaattaaccgatgaggaatcaagcttaaattttcgcctaaatttaatttacaatgtaatatttaccagaattcaattatttgtaatgtaataattgttaatagcataataatacctagaggttgcccgttaaatataattgacttgtccttgagtttattaaaggacatcgaaggtagtaatacagtgttaagaagaagccttcctgttccaaactggaaacacacaactctcttattagaagttgtctgataattaaattaaggcaatgaacgcaccctattttgaattaattgagtaacaacggggatgggaagagaccactcagaatttttgtaaaccgacagtttacaatcctaaatagttattattggtagataaagtactatttcacgtagaagggtttcatcttcagaaatagatgattctaaaactgttttatccttttcgttattttcgttttcctcagtgccttcagatgatcgagatgtgtcaagtttattatcaatttgtttgaaatcagaagaattatcatgttttgaaacctttaaaaaggaatctccaggatctatttttgcctgaaagtattaatctcattcgtaaccaaccagcttggcaataggacagtcatattcctttgtgtttgttaatacattaaaatagtcaactttattaggatcttcctttacctaaacgataatcagaaattttcctaactgaacaaagtattcattaaaaccataccactgatttaataatatccagaaatgatggtgtatctgaaatgtcggacttttttagcctaaaatttgattttataataattgtaaatttaaagtacttgaatggtttatcgaatgtttcagtttctgaaccttttctctttaaagtttcttcatccttagaattaaattcatcggagggtttacacacctcgttggaatcatcggaaacatgagaatcaggttcatgagtagcatgttcggaggaatcattctttgtttcatcgtgatcatttgaaggtgaggaatcactagaaccagtcatagtagtttataacatcaacaatagaataataaataaaaatgtaatttatcaaggttaaaaataataaagtgtgattgaaaatgaatttaataaaattaatggaaagattaaacaatttgtgttacaaatttaaacatacatgaggagtataaaatgtggaggaaaaaaataaaaaataagtttaaaacataaaaattcatgaaaacaataaaattaatgataaaatataaataaaagtatagataaagagaaaaacaaataactaagtcgtcaagattcaatataaaataagaatatttagtaaatctagaaaataatgataggtggttgtgggttcaacgatttaaaaaatcaaaattagtgtattattattatagaatacaacattggaagagatatattaagaagaaggttgtgttaaaggtataaaattttcatgagggtattaaaataaaataatttactagatccatttggacgagaagtaaaatgtttttaatgtgtggactttcgattagtatttaagagaatatggtcgaattttagtaaaaaaatgataaatttttgctgatgggggagttaatggggagtatgaaataaatatgattcaataatccttactatatttaaattttatagtattaaaatattaattattttattatctattattatttttattagacaagatttatattgaacctaaattatataattcttgtaattcatatttatttgttttcatttacctctaaacatgggtatttcacgtgacagccgtcacaagcgccgtttaacaggtggtcgttatcctgttcataaaaagaaacgcaaatatgaacttggaaggccttcatccaatacaaagttgggttcaaaattggtacgtaaagttagatgcagaggaggaaacctaaaattcagagcactacgtttagactccggaaatttctcttggggatcacaaagtaagtttagttataatggctatatgatgacaaatttttctgacgtgcttctaccatgtagattctcatctggaattaccgactgatgccattttattcaatctaacaataatttagatgtgactcgtaaaactagagtaatggacgttgtatataatgctagtagcaatgaattggtccgtaccaaaaccctggtcaaaaacgcaatcgtaacagtggatccaacacccttcaaactatggtttaagacacattatggactcgagcttggtattaaaattcgtgttttattatactttaggaaaatcctccgaagatccacaagcatctgaaaaggtcgccgcactggtacccagaacactcctggaccagttttcttctggacgtcttctggcttgtatcagctccagacctggccaatgtggaagatgtgatggttacgtactggaaggcgaagagttaaacttctaccgtagacgtatggataagaagaaacgcgtttaatttaatcctcaatatactattgctaatatacagactattaaaatactttacacaactagtcactaatgcatataatcctccaagttttaataaattggtaatagatgtttattagtccatctggagccgtaaagatgtaaaaaatatatatatatgttaatattcaaaggtatatggtggtaataaaccaaaggtaacaaaatgtatgatagaataacacaaattaaaagtaaaaaatgtcttgatagagtgaaaaacttgtgaattttataatggattaaaaattaatagtaatttttagtgtgaattgtgtatttagagagtcaaactagtaagtattggtaggtataaaggtaaaatgctgttggaaatgtttaataaggcgttattgtgtgttaaaataactataacaataatataaagtaataacaaaagttctagatttcataggtgctttgaaatgatggaaattgaaattattcctttaaatccccatgcatgtcaaaaacataataaaattaatacggataaaagcgtatgtccgtaaccgtgtttaggtgtatatttttatatattctattccttttcccaaaaaatgtagtagattcttccagtgattcagaagaagagccatttccaacagttgggaaaatcctcagccctgaatccttcaaagtcttcacatatactgaaaataaccttaacaatctaaaggaaaatgaagacagtcactaccgttttgtaaataccggttcatcatttagttatgagttcaactcagacgtcaaatgtaatgaggttaaatacaaggataggttgatttggatttatctcccaaaagaatctgaaaacggtttcccagaaaaaatcatagttgattcccatattttcgtggtattcctcgttttccaggaccttttgaaactgtataaatgtgatgaaaatatatgtaggcttatctcagaaaaacagtcttccgaattaaattctagtaaacttggcctttataccaccgatttagagaatttagttaaactggatccctccaaaatccaaaataaccatggttttgaaattcattacaacctcagtgatcaaaccaacaccctaccagattctaatgagttaattaagtgtaccgaaattcaatactcttatcaaactctttggaagtatggtttaaatgaatcaggagataaatatccatataaagtatatttcaattcctttataggtgcaattattcttgatttccaaaaaatttacgtgatatataagtatgatggaactcatttccactcctcatcaacagatgcattatatggatcaacagaaagtgaattcaaactcattggagaaaatgatttagaaataactaagactgaatatgaaatcattaaatatccacatgataatgcttttgcatttcaattcaaacaagattccaggtgtactgaaattagatttaaagacaaatcattttggaaaaatctgaaccaagaacaagttccagagttgttatacataaatttttccaaaagactggttatgattcaaacccaagtttcatttttagtctacacctacaccgatcgttggacattgatatttgagggtaatacccaactacgtgatatagctgacgataaacctcaagaaatcaaacatgaagaacctaaagatattacaaaggatgagtatgtattccgtcttggtaaaaaaccattcaggatcatggaatttagttcaaaaacaaagaccattcttgttttgataggaattttcctcttattcctaataatcgtatgccttattatattcatcaaatagtttaaagtccaactgcccaatggcaaactaacattaaattcaaaatattagaatgaattataccaatttaagttttatctgactaatttaacaacaacttataattttttataagattaatgaaattttgaaaatttcataatttattaaataaagtgacctatgaatatatttgtttatacatgataaaaggaaaattaaattaaaattctgtagttacttaatctattcatttttaataagatataaccccaattaaatgtgaaatattttaaatatttctattgttatgttgctttattgtttgaagaaaattttgactagtgaatacacaaaaatgattaagctaataattataacgacttaaatttgtttcattttatttatctaaatttattgataagtgaggttcaaatatttcaatttaactagtacgagatgcaataaaatcattagataataatactgtaatctttcgttattattttagctagatcacaagacaaagatataaagactttaaattattttagtttaatcttctgatcatgataatatacaatattttagaccaaattcgatgtcacaattaacaccactcataatttaaaactgtcttaaaaatcctaacctttttacatattcattataactatatcataccaaaatctttgaagttaatgtattagtcaatgggaattggaaatgtagatgacaagtatatattcaaccaatgtaataatcattgattggttagtagaaactaaatatttcgtaataaaattgtattaaacttattttaatcatgaaaattgaaatgcttattagtatcaccaaaaccaatcttttcaaaatatggtcttagtcgaaattatattccttgatgaaactttaataacgtaagtatgtgagtatttatagaattaaaatttatattacacatgccattgggcaatcttaaatattacacattaaggttggttatttgaatacttggtaaccatttcttcgattacatttgatattgattcgtttttggatacttcagatgcgctgcaggtctttatgagtctgccattatgcatcacccatactgatgtacaagatttcagaactgttgaataatgcgcagtcacaaaacatgtacagtgcttaaagtatttatctaagagttcgtagattgggatgcccatatcctgaacttcagaaccatcttcatcataaaatatttccgacggtggttcgtcaattattatcattctgtataaatctctggacaagacaagcttggcaaaccaaagagttctaagctgagttacagataacataataccatcagttttgactttatcaatagtgaatgatttgtcaaggtaatgatcgttacttttgtcaaatgactcttctattataatttcttcgtcaggaaacatcatatttgtggattgatcactagacttcctttttaaacttatgggtcttgggataattacagtatccagttttcttccaccgtgaaggttatttacaaaatcaagcagaccacaattgtccagggcttcattaatctcatcatcattgaatagtctccttggatctaagaaccttcggacagtccaacccttaaagacaaagggtaactggggaagaacgccaatgatatgtctaatgacacttttgggaatatcttttaaatctttgccatcaagcagtacttgacctgttctatttctaatagtgttttgtaggacagatagtaaagttgttttaccagcaccagttctaccaatgataccaatgatatcagatctaccgggtgttgcgttaatgttgttaaggatgaggccttccttgttcataagtgatgatgcatagacgcatacatccttcaacactaggccagtgtgttcaggtgatatatatttgcaaatatcaataatattaatctttggattgaaatcaagcttttcaaatgaattgggttttgtttctttgaattcatttgttcttctcctaagcaagttttttttatctacttggtactcaggtttggtagaatcaataactacatcctcttcgtgaacattgcggaatttgtcaaacgcacacttggttcccggagggatgaagcattggaatctttgagcagaacacatataaacttgtaacctagcaaaacaaaatgaacaattgccgaatgattttatagcgctagaagttagcgataaacctaatccaaagtacccaacattcatcttgtagtttgtaaatttatcaagtatgatcatggacgtgaggaatagagcggttgcgagtgaaaatatccagttaaaggatatagtggtccaacagttcagtcccttaacgaaaaaccaacatcttaatttataatcatttctttcgataatattattaaccaattcccattcctttttaaaacttctgtagattgctgatcccaacatggcattctcgcaagttgaattaacgtgagacatggtttctaaacttgctatctgaacattattaaatgatttaacaaattttactaaaataaactcaaatgaaatggccaatgatataaaaataaatggaacagaaaggggaatagtgtaaaatagagttccaatagaaatgactgtttgtataaatgacaagaatgtagtataaatatttttcccgatatattggtcaataaaaataatatcagaagaaaaataagttatgatttggtgaatatgtttcttgatcttaatcactgatgaactgttcttaaaaactgaggtaagacaatattcgtggattctttttgaggccattaaacatgataaagtaaataatacggtcgacattagagaacaacacataatgacattaacaaagatcagaattaagttgagggcagagacgctatgtaatttgacatctgataaattaacagaaattccattattaaagtctttcgttttggtggatatataatctgagagattagttgcgagaacaaatttggagttatccatgacacttgatgcaacagttagaataataaacaaaataaacgaaaatccagctgccttgaaatacatgaaatatggattaaatttatcatcagagtaatcagttttaakaatcgtactaaacgactctctatattttgactttgttacaagacgtctaccatccctatctatagaacctgaataacatagtttcatcatatccttggtaaagaaattcaacttatatgggcctgaaggaggtgtgatatattcaaaggcatttggtagctttttgtctttaaaaatatctgataaataacagctgaaaatcaaatatttgttatcaatctcgtataccggaattctggggaaattaaccaagtctgaagatctgacacatttatccaacaatgttagtgatgaagaaaggataacagcaagatcatccttgacaagtaatccagtcttggaattgaacaggttgaagaatacagttctggatacgtaggggtctaacccatggaactgtgaatctaaacacatcaggaatgaacactggtttctgttgtactccttgttcactttactaaatatgagataggcatagatggctctggccatttccattctaactctttgaccacaacttagtgagtgagcactatctgaaacaactctaaagtcaccattttcccaagttgatatatcagtatcaagttcaagtgctttgattactgcgttataaataccctgatcaaacctgtatccaaaggttatatttgatctaatagttccttgttgtagccatatatcttgtgatgcataaaatattggcattgatgtgtgaagtggaattacggccattgaaccaccaaccagtgtcatctcaccaagaactgatttgatgaagttagatttaccacaaccctgactaccagtaatgatagcaatttcacccctcttaagttggaagctgatgttcttaaggttgattttaggattagcattaacaaaatccttcctgttatggacccatgcaaatgaagcatccttatataaaactacaacattcttcctgatttcattggtaacgtcaggcaggtcagatgataacaccgtagaaccggtgtgtctattatcactgatgtaaaagttaggtgaacaactggtaacatatttgttaaccctgttgtatgatacatatgacatagttaatcttccaagtgcataaggaagcatgaacattgaattgataatcctgaaaaatatgtagaatgttgataagaatcctccagtgtccacatccttaataacctctgcagcttttattgtttttacaaaatacctcatcaggacatagaaggatatattgctaaatattacatataacgatttgttgagtaatgtcaaaaaaatcctaattaaaactaataccagttcactattcctggtttcagtaatgatgttgacggcaatatcatcgtagagtaatttgttgatcagaggcaactcagatataatttcaatgcattctgagatcctataatccttgacatggcaaatgaaatgaaaaattaaagtgtttatgatctcaacgacaatcataagaaaaatgaaaaatgctccaacaaagtacaacgcccacaaattaatcttaatctgcatggaaattaatattattccatagataaagttcgacaaaaagttaacaattggtattaatgattcaacgaatagagagatgtagaagcaatcataatactcaaaggtgaacatgtttggagtaatatctttgttttggaaacgccgtgctggacaaaacatagggttttgggaacattctgagtcaggaagacaggtgtgtaaaacattgttacaaacactcaaggagttggatccattgatattattgaaatgttttcttctatagcacatgccatgttgaaacactgtaattgaaatagaatattccaaaacagtttttaatcgattcagatagtaagtaaaattttcaatcaataatccatcaataatctgtagacctatcacagcaaataaaaacaaaaatattttcagtagagtaaatgacttcgtgttcaaaatgcccaagaggtgtttaatcaaaatggtaatgctcagactaaacagattagtgactacaatcccaaggagaccaaatgatactcttttccagaatgttaagaataaagctcttaacaaaacagatttaaagggttttatattgggtttattattttgttttgtttcaaatgactctaatctaactaatccatcactaaggttcttggagaaaactggataccaatgtagaatttgatcagcaacgggaagtggatgtaatttgtatggttctacatattggttggtaagaagacgcgaccatttaggtacccagtgaaagaaaagaaatttcaaaatactactggagtcataatatttgaactttgtgtcacaggatttttctttaaagtaaacgttggagtatgattggctttcccagtaatgttctatagaatcagagttatttttcacgggacccttgaaatcagtagttaaatcaaaggtagcataaggacgtttttccattcaaatcagtacaggaatataatcaattaaatttctaatgttgatattttcattttatttaggaaattataacaagatgttctctaaatggaattcaccaattgatttacgaaaagtggaataattgattaaataactgtcaattttttgttctgtgacaattaatatgaaaagggaaacagaatcagtacaacgttatctaattgaagtaataaaaatcgggagtgtcctgagtcaatgatgatcattataacaaattgacgttaaaataataatccaaagtcgcaagaaatttaaattaaaactttaaaattcaaaaagtagtactggtgtaacgttttatgtcatttagaaggtgtgatagtgtattttattatgatattcaaattaggggatgatgggaatatgaagattttaattattaaactaaatgttaaaaataaatatttaatgaagcaattgaaaaaaggacaaaataaactaaagttaacaggtaatgttcccaataatttgagaatctaaatatatgtgaatgaatcaaaattgatttattacaataatcatagttgtaagtagtatttataaccgaattttatataattaattagattagacttttatgtctaatactcacattatacggtaccatatcagtaatcctatgtaaaatcaaaatttattattgattatacaattcgtctggttaattttatcccaaaacattaaaaatacattcataaattattcttaacctaatttgttaaacctttttttaatataaatcatgttttggataaaactaattttacacatacttatcccatgcaactactataattaattaaacataatcattaacggtaccacaatttacacccctagtcttatattgttcgtataatatttgtacaataaaaattttgatattggaactttaattttttaaaaacttatttaaaattattttcaaaatatcataaatctaaaaactacataaaataataattatatgaagttttcacatacattttaatgcttgttaaatatgaggattttcatgacattaaatttatacaagaaaattttctttaaatatcaaactagaaataaatggatggttgaatgttataatataatccaaattctgtggtaatttttattttaattgtaatttaacatgtcaaaaaagcacaaaatataaattttgtaaataaaaaaaggcaaactcaagatttaagaaattaaaaaaaataaaatagatgtttgattaaaatgttaatctaagcatatttgtaaatacaaattttgatcaagattaaatttaaaactctgttcaaaaaagtaatatattgatttttttttaattttatttatttttaaattagaattaattattatgttgtcagcctaataaatattactttttataaactatgcagttaataattgttcaatatcactattttattatttttatattaaaataattaattttattaataaatttttaatgtgttaaattaaatcgggtgaaaaatcaaatcggatcaatagattaaaattctatagtaaaatatatcattttatacaaatattgttttcagtgactgatctgttttataacatttttagattaatgattccccattatagatcttatcttaaatagatcaaacaaatgaaaaggtgtaaattttaatgaatttgctctctaagttactattactgtacgttttgttgatttggtctggtaatttagtattttgttccgattctgatctgtcttcaagttctgataatgatgaaactacagttattttttctaaaaaagtagatggcaaattaattacgcaaactactaaaactaagactaagactaagaagaggaagaggaaaaaagaacacaaaatatctaaaaaacttgagcagtctgcatcaaattatccagatcattcaacaacctcttcagatgaatcagaaggttcaaaggataattcttcagattctgaggaggaaattagtgtaactactaagagaagagtgggagatcgtattattgtgacaactactacaactagaaccaaaattactagtttaaagaaaaaagataaggataaaaaatcaagaaagagaaaagtaagttatttaagagggtcggacgaggaagaagatgacgaagaactaataaaaaggagaaaagatatctctggattagattcaaatttaaccattagagatattatacccattgaagaaagcggtttaagtagtcaaactcctgtccccttatcgccaacaaaagaacacagtccagaacatttgggatcatttccaataacacatcctcaagacaattggtatcaatttccaggtttaagtcattctgattatgatcaaatgtgtgatttaattcctaagactccacaatcgcctaaatcatccgacggtgatgaatcagattatgatgaaaatgatgaagaacctgaagaagcacctggagatgaagatgacatagtggagaaagatgaatctaatgatgatacagtagagaaagttgaagatcagaaggaagttgttcaagatgaagaaggaagtgacgaatctagtgatgatacagtaacgaaagatgatgatattggtggatatggtgatagtgaagaagatgaacttgctatgtttctagatgaaaatattggaaaaggcgataaaaaacaaattaaacctgttgattattcaactggtccacgtaataaccctgaagtagttcaagtagaagtggaatcggaagatgaagaggagaaaattgaatctgatgactatgatagcactgataacgataatgaagaaaaaaatgaaaaagaggaagaaactaataatgaagataaatcataagatatatgttaaaaaataaaataattaatagattttaatgtaatattcaatcaaataataaataaatttttataagcaactttatacaaattaaaaaaatgtaataataaaaataaattaattaattattaacattaagtaattaaaaataattatatattcatagtacatttagcctattccccatgtgttggattcctatcataatttggggttatttggccaaaaaattatttaatattttatttttaaaaaaatagttttcaaaagataattttaaatatattacatacattatactgttccaggtaataaaattcataccttctccaattttataataaataaatttccttactaaaattttcaatacaattattcataatattttactattcaactataaattggttgttatattagtatattaatacttagtaatatttaacgctaaattttgccatattatatctccctactcattaatctatgtgtaattaatatattaattattattctaaatatgatgccaaataatcctctttcatcttcaagttcattcaaaaatgataataaatttgtgaaataaccaccaataacatggttataatgtgtgtcgattttagtctgatattattttttatttgtttttaatttcgagatcccccatgaaatactacgatattgtcaatagaatgaatttatgtgtgtgttacacatatgtactaatacatataataatccaatatgccagttgttctgataaaccaagtaaaatagaaccgaatgttacagttgattctgacgacagtgatgaagaggaaaattttcaagtaatcgtaagaggaattgaaaatattcttgaagaagatggtgaaaaaactgctggacaaacggttgtttcagataatgttatggaacatgggcttggaccagtcactgaccaagtatatataccgccaacaccacatgacccaggattaacttatcaaccagaatatcctactggatatgaagaatctggatatgacacaggacagtattaccaaccagaatatccgactggctatcaacaggatgaatacgtagaaactggatatgatgagggagctgttggatattacccaggatatgaacatgaatattatttagaaggctatgaggaggaatatcattcagaaaatgaaaaacaagaagttacttatcaactggataaaaaagaggaaatagttgaagatattaaagttggtcttggatatatacacccagacttatcctcaactaagtttataggattagatagttctgggagttttattgaaatggatagtagacattatagaattgataggaataatattttcagagttacgtttgtattcaaaattcctatagtagaactgttttgtgaaggaacgaccgtatgtgaaattaaactctccgaacaaccgaaaaatttgatatatagtaaaataaataaagcatttttcttttactataaagaagtggcaaaatcatataaatttaaaaggggaatctggtatagaataatacatatatatccaaaatttgtaaaattttactcaattgatcaaacgaaaaatcttcttgagataactgaaaaccaatatatccttctcgtgaatacaaaaaaagattttatgtatttctttaatcctaaggtcaaatgttttgttgttaaagttaatgatgaaatcgtttggagttaccacttgaacgcgatatttcctaggtatgtaatcgtgaattccaaaaataaactcgtgatcaatttttatttctactgtatagtgtatcgatttttgaatggtttgtggacagtggtatatgttggaacttattagaaatttaagcgcaggaaatttaaaatattattggttagttttacttttaattataatagccaacgcattgttttaaataataatattggctttcaatatttttattcggtgctcattattttttataaaaataataattttacgttaaaaaatgcattaaataattaaaaaacgaattttaaattaaaattttttaaaaataaacatattattaattttcagatcccccatggatcaaacctagataaattatagaatggacatatgtgtagcatacacatattctataatactaatattgataggatatgccaaatgtgccgataaacaagataatttgcaaccaagtgctacaggggatggttatgatagtgatgatgatgaaaattttaacgtaattgtaagtggagttgaaagtctccttatggaagatgaagatagccaaactgctggagaaacggttgtttcgggtattgtcatgcaacatggacttggacctataactgatcaggcttatggaacacctcaacaaccaatacttcaaccctttcaatatcaacactacgtaccacctgcacctatccctcaagatcctgctccaacacactactatggaccaattggatcaccagtgcctattcctcctagtcaacttgtcactcaaatacctggtcaaatggaaccaagattaagattaccggtaactacgatgtatccgccatatggacaaagttctgatataccaatgcatcatggaattggtgtaccatcccagatatatccacaacctccagtaacttatccgtatcatcaacctttttttcatcctagaccaagacttacgccacccttcggttttcgtcctatgttaccaaggcatcctgtgccacatccaaatttccctgtttatcagccaccacaggcaccaaccgaacccccttataaaactgaagaaagtgagaaacctgaggaggaaggtgcagaagaaggtgcagttggaggagcagctggaggtggagatgatgatgatgagggagatgaaaaagtgaaaccatctgaaccagtaaaaatatgtgaaaaaataacatttatgaaaaagacacccgaaggcgtattaagtgaaatgattgacgaagactatatattggtattacaaagtgaaaacataaagaaatttaaattaaaagtaccccttgaagtactaatgtgtgaagaagagattgtttatgtacaaaaatctgatcacccacaatgcacattattaacccataacaaaaaagaactttgttttattcttaattgtgatgaccatttcattttgttaaaacgtggtaaaaacaactggaaagttaaaaagcatcaaattccagaaggtgttattttttacacaacaaccgcccaaggaattgaagttcaaatgagtagtcagcattattatatcgatctcactgcttcaggatcaattaaattcacatttttatctgggattccgtgcacgaaagttacagataggggagaagtagtttgggacatgaataattttcttgaaaaaccgtatcagatttgctatagcagtagaagaagaatcgttttttatttcacgacgagtattattatactaggaaaaaaaggtggtcagtataaaattttacggatttacgataatctaaataaacatcaagatttttgaactaatgactttgtttaatgtcactagactatggatatataatgccaaaaatattttcaataaaggtatatatttcaataaataagatattttgtttattgtttcactagtaatgtaattctttgatgatatataacaattaatttataataaattggacgattaatacgatcttcaatttccagatcccccatggattaatgtaaataacattcagataatcgataaatgtgtatatataaatctttattatttctaatattcatcaaatttgttaagtgtgcagatagatatccctatcacccaaatgatactagtgatgttggagaagaaaaaaataatgaagatgaaaacaagttggatttaatagaaaaggagttacaaaatattcttactgatgatgatacattggtaaaagggataaaaaaaatactcaaagatgattatcaaccatcaccacaacaagaatatgatcctcatttcactgattatgacccatccggaccttatggatataaatctcaatatgaacaacaaaatatagaacctggtaatacagaatcatctttatatcaacaaaatttttattccgtgccttatgtttatcctgatattacttgtcctccattacctatacctgttagtcaactactaatacaagacactcccttatcagaacaaccgactactaatatagcttttgaacctcatttaccttctgtaccagtagaaatattagccgagcaacagccaaatatagaacccaacgagcctgaagaaagtaaatttagttcacccgatctaaagaccagtaaaataccagaatctgttcctttaaatcaaactaccgcacttaaacagcctgtaaatactggaaaaggttcattgcctaaacctaggcctggattaatatatttaccaaggccgggactattgcaagcccctaaccctgctataagatttccaactccaagtttaccaaatattccttcaaaggaaatgtataaaccaaaagaaccacagcctcaacaaactcaaccaataggattacatctaacagttgaagtggaatttaacgtaactcaaacccaaccagcaaaacctactgaaatggttaaggaattagagccagaacgtgttacagtagaactgggatctgatgaagaagatcaagatgatcaaggtactggagatggggggaaagatcaaaaatcagatcaacccagtgaccaaccaagtggatcaggaggagctgagggaggtgatgaaaaaagtgtttctgaagggttaggatatatgggattaaaatcaatgattttttttaagaaagatgaaaaaggaattgtagttgagatgagtggatcagattacaaagtgttatggaatgatatgagtaaaataaagtttaaattttatgaaaatcttgaaatgataatttataatggagaagttgtttataaccatctttatttcagacagtatataaaatttttaatttataataaaaaaattaatgtttttactggaaactgtgaaaaggagttaatcatattaagaaaaatgggtagtgaatgggtactaaaaacccgtaaagttccagatcatgtaaaactatacaaacaagatttgggaggaaatgatcaattactatctgaagaggattatattgttgaacttagtgcgtttggatcagtgaagtttatcattatgggtgaaataaaatgttataaaattacagttaaagatatagtagtttggaagaaaacaagaaaggataaaacttatccaacagtattttgtattacagaccggtcaaatattttagtttactttgaaaaatatattctaacgtttggaaaaaagggtggaaaatatgtactaattggatctagaaaaaatgtaaaagattattaatattgtgagtatatcatattattttttagttctaacactatttctatgttattattatagatatttatttttttactggcttagaaacttttttaattacatagttttacattgaacacacattatagttacataactggtttgatctatcatataatattgtaaataatacatattagcatactattagtttaataatagtgtagtataaaaattataaaattatataattattatttgttaaagtgattaatttttggatcccccatcaataaatctagattttgcatataatggatatatgtattttatttagatttataataatatcctttttaatacaatttgttagatgtgctgataagcctggtggatatggagatccagataccgaaggagaagaagatgatgataataattttgatgtaagagtaaaagaattagaagatttgcttgaagaacaagataattttgattcaatacaatctaatttagaatcaataattgaagatgatgatcaacaagggggcgcttctcaacaaacaagttttcaaccaactccccaatcaacaacagcgagtacacctacagaatatggaccacaacctataccagcacaacattatgttccaaggcctcagatatatccacaatatccacctgtcggtataccaccaataccccaacaatatcctggtgtgtattattatagaccaggcctaccaggacaagttattcccccacctattctgcctccagttgcatatccacaagtagttgaacctcaaagaggaacaataccacgaccaccaataggatattttacaggttatcatcccatttcccacccatatcttcaaccaagatatcctggacctactgcaccacaacctcaagtttatcaacctcgtcaacaaagatatcctggacctactggaccacaacctcaagtttatcaacctcgtcaaccaagatatcctggacctactggaccacaacctcaagtttatcaacctcgtcaaccaagacatccacaatttccagtacctagagcacaatttagaccacaatatcctgggtttcctagatatcagccacctggtcaaactggagaagatgaaacccagggagataaaatgttaaaaaaagatgctcatgaactgataattccagaattaccggaaacatatttttatggtttagacgatagagataactttattataatgaatagggaccattttgaagtgatttctcaaactgaagagacaatagaaatgaaagtacttgttaatcttattgaaatagtgtatagaggaaagagtatatggaaatgtaaatcaggcgatgaagcaccaactttaatgatatttaataggaaatatgcagtgttgtatattcataacgaaagacaaattgtatcgtatgtatttttaggaagaaaatggactagaaaagaatttgatattccacaagactttttacttttcaaagtggatgatacaggaaaagaagttcaactaacaaaagaagagtattgttttgagattgataagaataaactaataaaaatgattataaaagatggagtaaaatgcactaaaataatgcgttcgggtttgctcatttgggagtactccggtggtgacaattatcccacagctataaaaataatcgatcttagaagaatgtttgtttactttaatggatacgttcatttatataaattagattgtggcgaatggagtctatcatgtattaaagataaataatacaacgataacaacgaagatcagataatttaattcaaattcttttagttaaaatgaataaattttcaaaaatccgaaatgtttttattcaaattgttaaattttagaataaaaatattattttaagattggtaatatcaaattcgtgatttgatgttattttattcccttaattaatatttttagtatgttgatatatgttaataatattattagaacactattatttgtaataggtcataatacacaaatgacacatatttacgtctatatttaacattatttatgtgtaacaacactgttttatctacgtttataatatcacattctaagattgacttatattattagtttattaaattgataaatatgtatggtgaattgataaataagtagtctacagatccccattgattgatcataacttctaataaaacaatgaatagatgtgtaacatataaatatattttaatatgtatagtaattcaattggtgtactgttatgataatccgaataacacacatgaaactgctggaaacgaaagtgatggagaagatgagaattttgaagtgacagaacctgaagaacaacccacccaaccacttgaagaacctacacaacaaccttttactctagaaccagaacaaacagaaccactggatttataaacaaaacctaaatctgtacaaccacaaccagtaaaacctagtcaaccgttacgaccagcacaaccacaatcaatttatttaaggcctagattaccagtacaacaacctactccgactcaaccaatttatccgagacctccattacctatacgtcaaccaatacaacgttatccaccacatcctggatattatcaaccgagatatcgaccttaccagccatatgcgcctcctacacaaccttatcaacaactgcctacacaatatggacaataccaacaattataccacgggtatcagagttacggaaaatataatccaccttatgcgcaaataacaaagacatggctaagtaaaggacttaaatgtaaaacagttagttttttgaagagtgatgaaaagggtgaattggttccaatgactactgaagattacgaagaatcaagtcctgaaacttcaatatccaagtacgtattcaaatcaaaacttgaacaattttactgtgacgatgaagttatttatactcgcaaacctgaagggaaatattgtaaatgcctaacatataacaatataagtaattattttattataactagtgatgatggatttgctttatttaagaaatttagaggtaaataggaatatagttctttgaagattgaaccggatattaaattatacgggacagatgatgaaggtggagacattgtgatagatgaaaatcattattatactgaactaacaccaactaagtcttttaagacggtatttttagatggtataaccttaaccaaaattaaagttagagaactgactgcatggacgaaatctgataaagatgaatctcctctatggataacttatacactttccggcaatattatattagaatttggcgaattttttcgtgtatttacaaaagagggtgaaagatataagatactttttacaagaaaaagataaaaaatagattaataaaataagtaattttacttaatattttttattttcttagtgatagtacagttaatttgataataaacacaacttaatgaccctactttatgtcatttaaaatgatttatcatacatatatcaaatttgatatatctaatttaatatattatactgaatatagttgtgttatcttttctataaaaagaaattattttattttttaattgatttttaatgtgatctcataatgatcacaaaatttatattttaaattatttctaattttgagatccccatgggtaatttttttattcatttaaaaattatggagcaaacagcatatatatacaccatagtattattaatagtccaacttgttgagtgtgctgatcagcccaatcaaccaccaattcaaccaatttattatctcattccaacaaatgaatcacaacaatcgcaaaatcagctacaaaatatacaagtacaaccagtagtgtactatgttgcgggtcctgaacctacaccacaggccataaattattatggaccattacccactcaacctgcgccagtacagtactatgttccaggacctcaggctccacagcctgtacaagtacagtacgatggaattctacaacagcaaatgcaaatagatcctgtaatacaacaattacagtatatacaagtgcctcaaccagcccctgctattttaccacaacaaatgcaacaaacttttggacctccccaacctattccaatacggcaatatgatccttatcaacagtatttacaagtgcaagaacctataaattacggagctcaaccggtccaacaatctcaaccacaacaaatagagtatatacaagggcctcatccaacccctgttgcactaccacaacaacaagtacattatggatcagttgtaccagctcagccgacacagcaaccgtatggaccattccaacctcagcatcaaccacaaatgccatccggatatcaattacctccacaaaatcagccaataccaatacctccacaaaatcagccaataccaatacctccacaatcacagcctatatcaatgcagcaatttgtacaaggacctcgaccaatacatccacaacctacgccgatacagacacaaccaatagtacatcctcgaccaatacatccacaacctacgccgatacagacacaaccaatagtacatcctcgaccaatacatccacaacctacgccgataccagtgcaaccgatgcaacagaaaccccctactcaatttaggccacctcagcccaaaataccagttccaagcggaccacaacaagaaaacctatatctaaggggacctcaactaccttttccagaacttagagagccatttagaccagaaatcaataaaggacctggtttattaggtcctgcgccaggaccactcagacatcctatatatgtaacacaaggaatcacaagtagagaacagcctatcaaaataccacatacgaaacatcaaactgagcgtccaactaaatctcaaccaactaaacctgaacctagtaaaccaactaaacccagtgagccaactgagcccagcggcacagataaggagttacaaccggagcgcatcccagttgaagttggatctgatgatgagactgaagaaggagcagctggaggtggagatgatgatgatgagggagatgaaaaggtgaaaccatctgaaccagtaaaaaaatgtgaaaagataacatttatgaaaagggacaatagcggcaaattggttgaaatgacagatgatgagtattttataaaatggattgttgcaacgaaaatcaaatacgtattcaaagcaaaactcgaagctgtgttatgtgacgaggaggttatttttaatcaagcacctgaaaaagaatattgtaaatcgatggtttataatataccttattgtgcatttatcttcggtcgttcagatggatatgtattggtcaaatatcataaaggaagctggaaattaaaagcacgaggtatcccagattacgttgaactctacacagtagatgaaggtggtaatgatgttaaactaggtgatgaagcttattatttgaaatttactccatccgcctctttcaaatttagtcttatacccagtgttaggttaaccaaagtagtggttaaaggtgaaacagtttgggagaaaagctgttccgacggtttccctatttccgtttctgttacagatagaatgaatgttttgatgtttttcaatcaatacattagaatatacggaccaaggcgtggtaaatataggtatttattcactagaccaaatttagaatcaactaaacattagtaaattaacactttaatatactaaattcagtatactatattaatatgttaataactctatttcaaaattatttctaaactattctgaaatgctaagacatatgatatatgcataaattaatatacatttcataaaattaatgttttaatattggtgcatttaattaatccagtagttaattatcaaatacatcgaagcagtgtgtgtaagttagcaattttcagatcccccacgaaaaaaatatagttaatctttcaatgaataaatgcgtaagttatacatatctactaatattcgtattagtttcacatacacattgtgcagataaacaaaataaacaatcatccaacaagggtctgggcttagtatcatatactgacagtgaagaagatgataattttgatgtgactgaaactaccgagggagaacaagtaactcaaaccccaataccaaaacaacctagtgaggaaaaaagtggagatcgacctgttcaatcggctcctgtaacttatcctggaattccatatccaagttcaagttatcaatcatatcaaccacctcaacaaattccttatgtttcatatcaacaattttatcaaggatatcttcctcaagcgcaagaaagagtacaatctacgcagtattatgcacaacaaactaaagaacctagtcaaaaacaagctatatcgcaagaaactaaaccagtaaaattatgtgaaaaaataacattctttaaaaagacccccgaaggtaaattaactgaaatgactggagaagactacacgattgtagaaaacagcgtgaataaagtgaaatatatcctcaaatcaaaccttgagcaattggtttgtgatggtgaggtaatttattatcatccagaaagtagagaacactacagtgaattaagttataataagcttgaaaacaactttttctttgtaagtccaagaggatatatattaatcaaaaatgttaaaggtacatggagaataagtagacgccaagttggtgagtatgttgaattctatacaaaagattcaatgggaaagaatactttaataactaaagataattatcgcattgaatttacagactttggatctattagatataagcttgctcctggagtaaaatgcacaaaaattatatataaatccttgaaagtttgggagaaaactcctagtgacggttatccaattgggttaagttttgttagtggaaatagtattacaatttatttcaataaatattattctgtatttcgaaaaggaggttcaaaatttacgttattcctttccaagagaaaataaagaatataattatctgtaaatctaattttttgttattcgttaatttaactaatatatctaatatataaaactatatatagttgttttgaatagtattaatgtagtgttaaatctaaaactaggctactccctaatattaaaatatctagtacaaattatattaactaattaactcaattactaaattatttgatttttattcttaatacgttatattatgaattttttaatgataaaagatatattaagtattcaaatttatatatacacaggataatttattattttccagtaaagtagcaagaatcgataaataataatacactaataaactctataaaattaatataaataaaatgtattttagtatattaatataatttaccgatcttaatattagatttgacaccctacttttaatattttatagatctatatacacatataagatttgagctaatttaatttgaaatatccattggatatcttttataatttgtttctaaatgatatttaataaaattgtacaaaggatattaattatcagatgcatgtgttacaaatatggattatattcatattgacagtagcagaatatgttaaatgtggtgataatccgaataacacacatggtactatagaaaatgatagtgatgaagaagatgataactttgatgtaactgaaccatctaacgatgttattccacaaccttctagtgaagtaagtgaagaagaagaaattcaattacaattatcagaacctgaagaacaaccatatcctttaggaccaccacaacccacacatcaaccttttattatagaagaagaacaagcagaacctctcgatttatcaacacaaccacaaccaatacagctacaaccagtacaaccaatacagccacaacaaatttatccgcaaccaatacatcctgcacatccccctcagccaatacagccaccattaccattacaaccacaatttcctcaacaattacaacctggttttccaattagaccaatagcactttatccaaggccaccaatacaaccaattcaaccaccactaccattacaacctggtcaccctgctcgaccaataccacgatatccacaagtttctggatattcaccatatcatccctatgcaaggccgccatcaccagtacaaccaatacctccaccgtcaactcattatgtaccaccgactcagcctcagcctcagcctcaagtgccacaaccacagtatcagtattacggaccgccaacacattatatacctccaactcagccagtacaaccaacacctgcagaaccaacacattatatacctccaagacaaccagcacctcaatttcaacaaccagtacaatattatatacctccacctcagccaatgtctcgtcctccaacatattatgtacctccaccaatgcaaccagcaccggcggctcctagtcaacctactgatactcaagaaaaggtaaccacaaaaagaatagttaaaaagtgtaagataattaattttatgaagaaggattctggaggtaaattgattccaatgacaagaaaagactacataagaatatataaggattcagcaaaagcaaaatttaaactatctgcaaatcttgagagggtactttgtgacggtgagctggcttatgaacatacacctggaaagccttatccttcattattaattgaaaataggcgattgatggaatttatcgttagatgtggcgataaattaattaaagttaagcatcatgataatatatggaaaagatttgaatataatgttccactttattttgaagttttcactaaagatggagaaggaaacgacgttataatacctaaggaatttttagaagttgatttcggttactatcgatcttttaaatttttatttatagaaggtactaaatgtcataagattatggttgaaaataaattcttttgggaaaaaggtgatgatgaagattttccagttggatttgctattaccactaaatccaaaattgtaatatttttcgaaaaaagaactgctgtatatacaaaattaaaagattgttataaattgttatacagcaaaccaagaagaaactctaaatatgagtaatattacacttttaataaaatcaagtaatgtaacatttataatatattttaataacaaacatacaattgtaccaatattttattattaataactatatattataaatagtatactataaaagttttaaatcagaaactcaaccactgattgtgaacctcttttccttcatattttgttcactcattccactttcatttcatcaactaaacaatattatttaaccactcatttacactttctaatctctttaaactttattacaacttgttattcaccagttttttactttagatctgagttttactcttagtggattagttacaaattctgctatgccatatatacttccatgtatatacactctgtatattatagccggtatgtataacatagccagtgataatgacattccagtgtatattgcctatttaaggatttgtttatacatcagaaagattagcatagttagttactgggacttggaatatcagtttcagggactgtgtcgacctggtcctaccaacttttgagcctcgactggccaattgggtatatggatttttagtcaattttagacacattaacgttaatttggattccattccccatttgaaaacttagttacacacatcatttaatttctttcacacacatttgtaatatgtttatatattaactttaaactatataatagtgtttttacttaaatttaagactaatatttcacaatttaacacattcaaatcgtcacacacatgaataaaacatcgaaacattccaaaatcatataaaacagaattaacatgttgtcaggatactacttaggtcatgtactgatgttaactaatgttattcctttgtccatcagttacttcatccatctattggtaccaatgagtaattgtttgaggaataactcaactcaatttggtatttttaattcgaatcataagtcagttgttgatttagaggttcaagtaagtagttaagaaccataattgacagactcctaagggcactaatctagaacacatacaagtaatgaccaatacctaccaacgaaaccacctaactaaggtaataggtcaaaccaaaccaactaccaaatgacctaactgacgtaatgtcctatctacctaatcacctaattacctaagtcctaatacctaattctttgactctcagatttggggtttattataatttcattccattactgtactttactacctcttaattctcactgtcattattttatcaccttatccattataacgagttaactgtttcaaggtattgttttagacttgagtttagagagtatcaaagtaagtttttagattaattatttagatagttttatagatgagtattaactagataatgttattaatgttagaatttagtaagtttaacattgttatgagtctattaacagttagttattagtcttgagtttactgttttagattaagataagtattttaccatgtttttagaattaacaccagggttgagggtttaaaagtattctgttagatcattatttagtggttttcaagttagattaagtattttacagtactttaagtatttgattttgtgttttagaaagttactgtttccgatgttagatttgattgttattttactatgtttgactgttttaacctgtttttagaccctagagttgagtagtttttagtagtaagttgagtcttttcagttgtttttggaaactagagttgagtagttttagagtattttgagtgttttttagaaagttactattcaataagttagtattttagatcttagttttgattgttttagagtgttatagattagagttttactttgtttgagttgagtgttttacgttgtttttagtacttttgttttggagtagatttatgtgttttagatttgttattgttacattttgatcataggtttgagtgttttaaatttgagtgttataattgttacatttttgatcataaagttgagggtttgaagtgtgttttttagaaagttactatttaataagttagtatttcagatgttagttttcagtttttgagtgtttttataatgttttaagcttatttagaccctagagttgatggtttagattattgtttaactaggttggagtatttttcagtagtaagtttttgtaaatcagtattttgccttttcgatttgagtgttttagattaagttgttttctgtgtttttacagtattttcagttgttttagaccctagacttcggtggtttttagagtatttctacttaagtgtttagaccccacagtagattagtctttttgaccatcaagttaagggtttagtattatccccacaagtattttagattctttaggacattaggttttagggttttagggttttagggttttagggtttagggtttagggtttagggtttagggttttagggttttagggttttagggttttagggttctagggtcttagggttttagggtttagggtttagggttttagggtttagggtttaggg

SEQ ID NO: 71 - DNA, 17691 bp, Theileria parva
accctaaaaccctaaaacctaaaccctaaaaccctaaaaccctaaaaaccctaaaaccctagaaaccctaaaacctaaaaccctaaaaccctaaaccctaaaaccctaaaccctaaaccctaaaccctaaaaaccctaaaaccctaaaaccctaaaaccctaaaccctaaaccctaaaaccctaaaaccctaaaaccctaaaccctaaaccctaaaccctaaaccctaaaacctaaaaccctaaaccctaaaaccctaaaacctaaaccctaaaccctaaaccctaaaccctaaaaccctaaaccctaaaaccctaaaccctaaaaccctaaaccctaaaccctaaaaccctaaaccctaaaaccctaaaccctaaaaccctaaaaccctaaaaccctaaaccctaaaaaccctaaaaccctaaaaccctaaaacctaaaccctaaaccctaaaaacctaaaaccctaaaaccctaaaccctaaaaccctaaaccctaaaaccctaaaccctaaaaccctaaaaccctaaaccctaaaaccctaaaccctaaaaccctaaaaccctaaaccctaaaacctaatgtcctaaagaatctaaaatacttgtggggctaataccaaacccttaacttgagggtcaaaaagactaatctaatgtggggtcaaaactctaaaataataccaatttgaaaaccccgaagttaggggtctaaaacaggttaaaacaactaaacacacttgaaacactctaacaaaaactgaaaacactctaatctactctaatttaacacttgaaaacaacttaatctaaaatactcaactctagagtctaaatgtaactctataacactataaggactccaatcttcttgaaaaatactaaataaggatctaacagtaagttttaaaacactcaaacatagtaaaacaatactttgaaaactagtctactctaaaacactcaactatagagtctaaaacaactaaaaactactgaaatcactgaaacagtagtaaaataacacttaaatataactgaatagcactccaactcaagtaaaacaatactttaaaaacactcaaacataatctgaaacactcaaaaaggactactaaaaacaactgaaaacatctaaaactctaatctaaaacactttaaaaatactcaaaactaacatctaaatcagttaatctaaaaactacttaaatctaactgtaaaaccctcaactctagggtctaaaacaactgaaaacactctaatctaggctcaaaatgaaacttataacatataagattcaactatagtaaaacaatactgtaaaacaacttaatctaacacataaaactactaaaatctacttataaaactcgaacattgtaaaacaataatctaaaactctaatctaactataaatactaaataattatctaatactaacttttataacactcaactctggtgttaattctaaaaacatggggaaatttaatgtcttagtatgaaacagtaaagtaaagactaataactaactgttaataaactcataataatgtttaacttactaaattattacactaataacaatatctagttaaaatacttacctatgaaactttatctaaatgactaatctaaaaacttactttgatactgtctaaacactcaaatctaaaacactatcttgaaacagttaactcaagataatggataagaatgataaaataatgacagtgagaattatgaggtagtaaagtagagtactggaatgaaattaatcagaaaccctgaatctgagggtcaaaggattaggtattaggacattaggacagttaggtgattaggtcattaggaccattaggattaggtcagttaggacagttagatggttaggacatccttagttaggtgtttaggacagttaggattctgtcagttattacgtcttttaactacttactggaacctctgaatcaacaactgacttatgaatggaactaaaaataccaaattgaagagagttattcctcaaacaattatttattaataccaatacctggatgaagtaaatggtggacagacaaatgacattagttaacatcagtacatgacctaagtagtatcctgataacatgttgattgagttttatatgattttggaatgtttcgatgttttattcatgtgtgtgacgatttcagttagtgaaattgaagaataatagtattaaatttaagtaaaaacattattatatagtttaaagttaataaataaacatattataaatgtgtgtgaaagaaattaaatgatgtgtgtaactaagttttcaaatggggaatggaatccaaattaatgttaatgtgtctaaaattgaccaaaaatttatatacccaaatggccagtcgaggctcaaaagttagtcggacccggtcgacacagtccctgaaactgatatcccaagtcgcagttactaaatgtgctaaggtttctgatgtctaaacaaatccttaaataggcaatatgcactggaatgttattatcactaagtatgttgtccataccgggtataatatacagagtgtatatacatggtagtatacatggtatagtagtattgataactaatccactaagagtaaaactcagatttaaagtgaataactgacgaataacaagttgtaataaagtttaaagagattagaaagtgtaaatgagtggttaaataatattgtttagttgatgaaatgaaagtggaatgagtgaacaaaatatgaaggaaaagaggttcacaatcagtggttgagtttctgatttaaaacttttatagtatactatttataatatatagttattaataataaaatattggtacaattgtatgtttgttattaaaatatattataaatgttatattatttatttttattaaaagtgtaatattactcatatttagagtttcttcttggtttgctgtataacaatttataacaatctattaattttgtatatacagcaattcttttttcgaaaaatattacaaatttggatttagtggtaatagcaaatccaactggataaccttcatcttcacctttttcccaaaccaatttattttcaacgaatatcttatgacatttagtaccttccataaataaaaatttaatagatcgatagtaaccgaaatcaatttctaaagtgtcctcaggtattataacgtcgtttccttctccatctttagtaaaaagttcaaaataaagtggaatattatattcaaatcttttccatatcctatcataatgcttaactttaattaatttatcgccagatctaacgataaattccatcaatcgaatattttgggttactgttgaggcgtaaggttctccatacttatgttcataagccagctcaccgtcacagagtatctgctcaagatttgcaaatagtttaaattttgcttttgctgaatccttatatattcttatgtagtcttttcttgtcattggaatcaatttacctccagaatccttcttcataaaattaattattttacactttttaactattctttttgtggttaccttttcttgagtatcagtaggttgactaggagccgccggtgctggttgcattggtggaggtacataatatgttggtggaggtatatattctgtaggtggaggtatataatattgtactggttgttgaaattgaggtgctggttgtcttggagatatataatgtgttggttctgcaggtgttggttgtactggctgagttcgaggtatataatgtgttggcggtccgtaatactgaaactgtggttgtgacacttgaggctgaggctgagttggaggtacataatgagttggcggtggaggtattggttgtactggtgatggcggccttgcatagggatgatatggtgaatatccagaaacttgtggatatcgtggtattggtcgagcagggtgaccaggtcgtaatggtagtggtggttgaattggttgtgttggttgtattggttgtgttggtggccttggataaagtgctattggtcgaattggrtaaccaggttgtatttgttgaggaaattgwggttgtaatggtamtggwggctgtatttgttgaggaggatgtgcaggttgtgttggttgcggataaatttgttgtggctgtattggttgtactggttgtggctgtattggttgtactggttgtatygataaatcgagaggttctgcttgttcttcttctatagtaaaaggctgatgtatgggttgtggtggtcctaaaggatatggttgttcttcaggttctgataattgtaattgaatttcttcttcttcacttacttcactagaaggttgtggaataacatcgttagatggttcagttacatcaaagttatcatcttcttcatcactatcattttctatagtrccatgtgtgttattcggattatcaccacatttaacatattctgctactgcgaatatgaatataatccatatttgtaacacatgcatctgataattaatatcctttgtacaattttattaaatatcatttagaaacaaattataaaagatatccaatggatatttcaaattaaattagctcaaatcttatatgtgtatatagatctataaaatattaaaagtagggtattaaatctaatattaagatcactaaattacattaagctactaaaatttattatatttatattaattttataaagtttattagtgtactattattatttatcgattcttgctactttactagaaaataataaattatcctgtgtatatataaatttgaatagttaatatatcttttattattaaaaaattcataatataacgtgttaagaataaaaatcaaatgaatttataattgagatattaaaacgtaatatattctctgaatgtaaactatcttatgggtaaaaacagtaactgaagttaacattcaccacactcgtaatataatactaaaaatatataggtatgaattattagtacacttgtgtttatgtatattaaatatattacaaatgttatattacttttttttactgggtcttttatgtttggtttctacctgttcataacagtcagctttttctataaatataacaatttgttcttcgaaggacaatgaaactcttcctttctttgttactaccattgcctcgggatattcactttcatcttcctttttttcccaaactaatttatccttgactacaaccttatgacacctaacacctgtattgaacatgtatttaaaacattcaaatgagcttaattcgacatcaatattctcttcggttattaaaacttcttttccctccgaatctttggtgaaaagttgaaagcaaaacggaattttatggtcacttattttccatttgttgttaatgtgtctaactatagttaatatatctttaattcgaatgaaaaattccttaaattgtctattttgaattaatgatgatgcgtaaggctttccaggtgtatgttcataagccaactcaccgtcacaaattagttgctcaagatttgcaaagagttcaaatttcactttggttatatgataacttacttttttgaagtctttttttgtcattggaatcaattttcctccttcattcctcttcattaatttaattatcttacactttacccgagttttcttttcaataacattttcttgagtctcactaggttcaataatatctaccggcataggttgatcaattggttcaggttgttctattggttgatcaattggttcagtttcttctgctggttgatcaatcggctgaggttgttctgttggttgatcaattggctgaggttgttctattggttgttcaattgactgttgtggaggtggtacataatgtgtaggccttggtggtattggttgtgttggtggtacatatggtgaataaggaggataaggatcatacggtgaataaggaggataaggaccatacggtgggtaaggtggatatggataaggtgggtaaggtggatatggataaggtgggtaaggaggatatccaggtggataacgtggtattggtcgaactggataaccaggttgaactgggaaaccaggttgactagcttgaggatgtattggcaatggatattgtattggctgtattggcagtctaggttgtggatgtacaggttgtggttgagcaggtttcatagataaatcgagaggttctgtttgttccggttctaaaacaaatggttgttgtgtgggttgtgttggtcctaaaggatatggttgttcttcaggttcttgggtgggttgatcactagtctgttctgttacatcaaagttatcatcttccccatgactatcaatttctatagtaccatttgtgttattcggtttgtcaccacaatgaacatattctgctactgtcaatatgaatataatccatatttgaaacacatgcatctcttaagtgatatcctttgtataattttttcaacgatcatttataaacagatgataaaaactagagagagattatatcaagtttaactagctcaaatatgacgtgtgtatatagatctataaaatattataaaagtagggtgtcatctgaataataagatcactaaattatactaatatactaaaatatattatatttatattaattttataaagtttattagtgtgctattattatttatcgattcttgctactttactagaaaataataaattatcatttctgtacacatcatatcagaatgcatgatatatctattattattacaaatattcacaacgtaacatgttaattgcattagaactcaagttaatgaataattgagttaatcaatattaatttaatttgtttaacatagtttattgtcgtagttaaatattgaagttgacattagtaccctcataatatgatattcaaatatataaatacggataattatagaatattaatatacttgtatttatgtattaaaaatataatatattgtttatttaggtttacgatgtttttaattgatttatgtgggcttggtaagtattatttaaatttaattatcttcagttattctaaaaatagttcttcttaatgaataatagtatccactataattaatttcatataaagtaaaatattccttaaaatgaagtataatatttttttttaaaagtaaaacaaggtgccaagagataatcatctttagaactctttttccaactaagcatatcattatattcaactctagtacaatgtaaatttggtaaaaagacatatttcaatgttccatcaccagtaagaccaatatcataatgctcttcagttattaaaacatccctaccatcatcatcttgtgtgtaaaatttaatataatccgggattctcctggaaattgttgtccatttaccatcaactaatttgattaatagaaatgcatttttacgaataatggtaaaactgttccttcctttaaaatacgttaataatgacgagtatgttctttttggcctatgaatgtctctgcatcgttccctgcctctctaaagtcatcaccagtcatttcaattaactttccctcatcatttctcttcaaaaatttgatcttcagtaatcctctaataggttcaaaatgttcttcataatcagatcccaattgaactggaacactttctggttgtaattgtttaattggtaaaggatccacatgctgaggttttggtacgtaggattgcggagttggaaattgatgggagtattgaatttctgtttgtaggggttccactggtatagtttgtggttgttcatattgttggtattgttggtatgattgtatatctgattgatagtgtgtaggtggatattcaggataatattgttgatatggaccatactgtaaagtttgagtccggtatggttggtaaggtggtaattgataatattggggttgggatacaacaataggaatttgttgtatgagtactggttgaataggttctactggtgtgtaatggggagtatatccatagtactgtgtcggtacatgttgttctataggtggcccatagtactgtactggagctatcggttgaagtccgtaatgtgtagtttgttgttctggtgtttgattttgattttgttaactggcttcagttacttcaaaattagcttcttcttcatctgaaatttcatctccaacattttcatgtgtgttgattagataatcaccacactcgacatatcctaaaatgatgaatactagtatataattatatattggacatttgttcattatttatttataaagtcttatcccatgggggatctaaaaattattgaaatatataatacactgatatataaaatatattatcatctaacaatatatgtaaattttaataaattaatatataattcaaaattgcttttacaatagcatattgtatttgttaaaattaatttaggaatatttagatcttcctgaaaattttctcctaaaatacagtatatatttatcatttttgattcctaacactttactatatccctcaaagttaactataacacgcatttttggtgtaacataaatctctaaaggataaccatcatcatcagttttttcccatgcaaccgtatcagtaactacaattttagtacattttacaccatgaaaaaattcgtatctaaaggatcccattgatgtaaaatcaatattgtaatctttattggtcattaaaacataatcgccttccttattttgtgtgaatagttttatatgatctgggatcggagcatcagttcttctccattcccctttagttttcttaactaacgtaaatccatcactgctggtcagtataaaaatatcagttcttaaactatggcttaataataaacaataaggtgttccacttgtatgttcgtagactatttccccgccacattctagctgctcaagatctgctctgaatttatatatttttttatttccatcgctaactataataaggtagtcttcatttgtcatttctaaaatatttcccgaataacttcttttataaaatttgattaaattatattttcttcgtggtttgggctcttttcgtttaactggttcttcttcttcatctccagactcgcttggttcatctgatggaactggacttggagatcgacttttttttcttttttttcttggttcttgagtctgttgatcataatccatcttactttttattttatccaacgactgagctgtctgttgtctctctttctctgtttcctcatcatcaatctgttgaacttgtataacttcaggttctaatggtcctgttggctgttgagtttcaactaattctggtacatagtgtgatagttgttgaaattgaggctgaggttgtggttgagattcttgaatactttgagtttgcgtcggttcatataattgataacctgcttgagtttgttgaaaagttggtgttaatacataatgttgataatatggataacttggttgagtcaatggtattgatggttgagttaccggtatataatgctgataagctggctgaatctgaggttgagtttcagttattggttgatgaccaatatcacaaagagtctgtgttccatatggctgttgatatacataaggatcttgggtttcagttccataatactgatattgagattcctgggttagttgaggtacctgaggagttggttgagtaggtggcggctgataatattgctgttgttgagtttgtgtctgaagttcatatgactggtacggagcatattgttgaggatggtatcctgatgtttctggttgatattgaaatgattcagtttgatatcctggatattgttgaggttgatatcctaataattctggttgatgctgatcataagattgatcaagatcatattgttggggttgaatttgaggttgggttggatattgagattcttgtaattgttgatattgtggtaggtattgaggatcctcaaaacgatcaagtcgttgttgaatgattttatctaggtctaaaacttcaaagttgtcctcctcatcctcttcatcagcaggctgatcaggattattgtcttgtgatttgacacattttattataataaatattaatacacatttgtatgttacacatctcatgttaatagacttttataaaaaattttccatgggggatttgtaattaacaactcgttttattaataatatttcataaaattattatatattagtaatattaaatgatttttaataaattaatcatattaaatgatttataaaattggttaatcagatatataacataaagctatatacaataacattatattgtatgtgttaaaattaatttatttgtatttgcgtcttcctaaagtttttttattatatagaattctatatctatgaggtcttctttcgaacattttagtgtagctgtcaaaattgattataagacttaatttattagtaacataaatcactataggaaattctgcatcattatcagttttttcccatgcagtcatattatcagcttttatctttgtacattttacacctgggtgtaattcgtatctaaaggatgcatgtgaagtaaaagtaactttgtaatgttctttagttagtaaaatttctttgccttcggaatcttctgtatagaattttacatactctggaatcttttcttcagttgttgtccattctcctttaattctcttaattaatataaatccttgaatattagtaatgacaacaatcttagtttttttactataagttaatgatgaacaatatggagttccatcttcatggaggtagataatttgattgtcacattctatctgctcaagatctgcataaaataaatattttgttttatttcgatcatcatatgtaacttcataatcttcatttgtcatttttacaagatttccatcagaatcaattttacaaaatttaatttcattatatactttaggtttattcggtcctcttcttttaataggttgttcatcaccttgtttttctgattgatcttcacttggagatctagctcgttttggtttcttcggtttcttttttttgtttttgtggttgtactggttgttgagattgttccttactaggttcaggttctttttgtgcatatggatgatcatgttctgtaacatggaaattatcatcctcttctaaagtttctgattgagtttgaggtgactgaggctgagttacttctgtttgagtatgaggaggttcataataatgttgttgttgggtaggatgactaggatcataatactgttctggttgttgagtttgagtagtagtaggttcataatactcatactgtggttgtggtagttgaggctgagtctgagtaggttgactaggttgataatactgttgttgttgagcaggttgagttactggaggttcgtaatactgatgttgataggatggttgatgtggaggatacccagggtagtaattttgataacttggttgttgagtaggttgagttactggaggtatataatattgacctggttgactaactcctgattgttcataatattgataaccaacatattgttgacctgtaggatgagttggtgcttgatacgattgataatgttgaggttgatactgatcatactgttgaggttgatatactgataattcttgttgataatatgttgtctcaggttgatactgtaatacttgttgatattgatctggttcaggttgatactgaggttctggttgaggttgatattgaggatcctcaaaacgatcaagtcgttgttgaatgattttatctaggtctaaaacttcaaagttgtcctcctcatcctcttcatcagcaggctgatcaggattattgtcttgtgatttgacacattttattataataaatattaatacacatttgtatgttacacatctcatgttaatagacttttataaaaaattttccatgggggatttgtaattaacaactcgttttattaataatatttcataaaattattatatattagtaatattaaatgatttttaataaattaatcatattaaatgatttataaaattgttcaatcagatatataacataaagctatatacaataacattatattgtatgtgttaaaattaatttatttgtatttgcgtcttcctaaagtttttttattatatagaattctatatctatgaggtcttctttcgaacattttagtgtagctgtcaaaattgattataagacttaatttattagtaacataaatcactataggaaattctgcatcattatcagttttttcccatgcagtcatattatcagcttttatctttgtacattttacacctgggtgtaattcgtatctaaaggatgcatgtgaagtaaaagtaactttgtaatgttctttagttagtaaaatttctttgccttcggaatcttctgtatagaattttacatagtctggagtcgtttctgaaattgttttccatgattctttagtttttttaattaatagaaatacgtcactgaatgtcatgacaacaatcttagtttttttactataagttaatgatgaacaatatggagctccctttttattctcataaataatttgatcctcatattctatccgctcaagatctaaaataaaatcatattttgttttatttcgatcatcatatgtaactttatagtcttcatttatcatttctaccagttttccatcagaatccttcttataaaatttgatatcaatagtttttttaactggccttcttcgttttctaggttgttcatcaccttgttcttctggcgcttgaggatcttttctctttcttgctctttttcgcggtttaattggttgttgtggttgttgaggttcctgttgtggatatggttgatcatgttctgtaacatagaaatcttcctcatcttctaaagtttctgattgaggttgtggttgaggttcataatgttccattggttgtgtttgatatccaggtggataagttggtatatgttgataaggatcgtagctaggaggtccataatgctgataatactgttctggttgagttacctgttgttgagttccagttattggttgttgaactgtatcataaaaagtctgtgttccatatggcggttgatatccataaggatctgtagattcaggtccataatagtaatattgtgatatttgttgttgtgcgggtccataatgttgatacggtccatatgattgaggttgaggtgcttgatatggttgatatggaatggtttgtggaggctgaggttgaggctgaggttgatattgtccgtattgttcagcttctaataattcctgtacatattgtacttgttgttgttgtgatggaaattgaccatattgttgaggttgatattgaaatgattctggttgttgagttactgtttgtggaggtccataatatgttggttcttgtggatattgatatgattctccttgatcaagatcatagtactggggttgagtttgtggttggggctgagtttgtggttgggcttgatattgagattcttgtatttgttgatattgtggttggtattgaggatcatcaaaacgatcaattcgttccgcaattatttcatctaggtcaaaaacatcaaagttatcttcttcttcttcatcatcagcaggctgatcaggattattgtcttgtgatttaacatattttattattataaatattaatatacatttgtatatcacacatctcatgttattatagctttataaaattttttccatgggggatcctaaaaatattcaaagtaaataatatgtgatataaaattattataaattaaaaatataataaattttattaaattaaagtcattcatttaaatgtttaatatatcctgaaatttaaaaatacttaaccagtttcaacacatcaaaaatatttatacaataacatattgtatctgttaaaattaatttagatatatttaggtttcctaacgtttagtctcatatctgtgagtttatagtacttagtccttctttcgaacatcttagtatatttttcaaacttaactgtaacagtcaattgttctgataaataaataattgtgggatgtgcatcatcctcatcagttttttcccatgcaatcagaccctcaactataattttacagcattttacacctgtgagcaatacatatctaaaagatccgtttgaagtaaaatgaatactatattgatcagcagttattataacttcattgcctaaagaatcttgtgtgagtagttttatattttctggaattttataatcattttttgtccatcctcctttagttttcctaattaatgtaaatccttgactattggtaagtgcaaaaacattagtttctctgctttgacttaataatgaacaatatggcgttccatctatatgttcgtagataacctcatttttacaatgtagctgctcaagttctgcaatgaactcataatcttttctctttttatcactaaatgtaataagataatcgttaacattcatttcttccagatttcccaaattatttcttttataaaatttgatgtttttagtttttccaatttgcctacaccttcttcttttaggtattcgttcttgtttttcttcttcttcatctccacttgtagtttgagttctttttctttttcttggtttcttttgtggtttaattgactgttgagtaggttcttgagtagttggtggtacatgttgtgtaggtggtattggagttggttgtgtaggttgagttggtccatatgtaaatccagtatcagctgcagtaggtacttgttgtggttgatcttgttctgtcacataaaaattatcatagtcttctattgtttgtggttgtgtatgagggggctgagttacttctgtttgagtagtagtaggttgataatactgatactgtggttgttgtggttgagtcggtggtggtaaataatactgataacttggttgttgagcaggttgagttactggaggttcgtaatactgatgttgataggatggttgatgtggaggatacccagggtagtaattttgataacttggttgttgagtaggttgagttactggaggtatataatattgacctggttgactaactcctgattgttcataatattgataaccaacatattgttgacctgtaggatgagttggtgcttgatacgattgataatgttgaggttgatactgatcatactgttgaggttgatatactgataattcttgttgataatatgttgtctcaggttgatactgtaatacttgttgatattgatctggttcaggttgatactgaggttctggttgaggttgatattgaggatcctcaaaacgatcaagtcgttgttgaatgattttatctaggtctaaaacttcaaagttgtcctcctcatcctcttcatcagcaggctgatcaggattattgtcttgtgatttgacacattttattataataaatattaatacacatttgtatgttacacatctcatgttaatagacttttataaaaaattttccatgggggatttgtaaattaacaactcgttttattaataatatttcataaaattattatatattagtaatattaaatgatttttaataaattaatcatattaaatgatttataaaattgttcaatcagatatataacataaagctatatacaataacattatattgtatgtgttaaaattaatttatttgtatttgcgtcttcctaaagtttttttattatatagaattctatatctatgaggtcttctttcgaacattttagtgtagctgtcaaaattgattataagacttaatttattagtaacataaatcactataggaaattctgcatcattatcagttttttcccatgcagtcatattatcagcttttatctttgtacattttacacctgggtgtaattcgtatctaaaggatgcatgtgaagtaaaagtaactttgtaatgttctttagttagtaaaatttctttgccttcggaatcttctgtatagaattttacatactctggaatcttttcttcagttgttgtccattctcctttaattctcttaattaatataaatccttgaatattagtaatgacaacaatcttagtttttttactataagttaatgatgaacaatatggagttccatcttcatggaggtagataatttgattgtcacattctatctgctcaagatctgcataaaataaatattttgttttatttcgatcatcatatgtaacttcataatcttcatttatcatttctaccagttttccatcagaatccttcttataaaatttgatatcaatagtttttttaactggccttcttcgttttctaggttgttcatcaccttgttcttctggcgcttgaggatcttttctctttcttgctctttttcgcggtttaattggttgttgtggttgttgaggttcctgttgtggatatggttgatcatgttctgtaacatagaaatcttcctcatcttctaaagtttctgattgaggttgtggttgaggttcataatgttccattggttgtgtttgatatccaggtggataagttggtatatgttgataaggatcgtagctaggaggtccataatgctgataatactgttctggttgagttacctgttgttgaggcgtctggtatggtgtatatgattcaggttgatatcctggatattgttggggttgagtttgaggttgagtgggttgtgctgctgtaggttcataaggttgataatgatcatgttgttgttgttgactctgtggttgtgatgtctgtgtttgatatggttgataatgatcatattgttgaggttgataatgaccaaattgttgtggtagatactgatcatactgttgaggttgatatactggatattgttggggttgataatatgttggttcaggttgatattgaggatcctcaaatcgatcaagtcgttgctgaattattttatctagatctaaaacttcaaaattgtcctcatcttcttcgtcatcagctggttgatcaggattattgtcttgtgatttgacacattttattataataaatattaatataaaattacacacaatatttttgtacattctactattattagagctttactccatggggatcttgaaattaacaactcgttttattaataatatttcataaaattaattatatattagtaatattaaatgatttttaaaattggctaatcagatatatcacataaagctatatacaataacattatattgtatgtgttaaaattaatttatttgtatttacgtcttcctaacgtttttttattaaataccattctatatttagaaggtcttcttctgaaaattttagtgtagatgtcaaaattaattataacacttaatttattagtaacataaatcactaaaggataacctggatcattatcagttttttcccatgcagtcatattataaattactattttatgacattttacacctgaatgtaattcgtatctaaaggatgcaaacgaagtaaaa
